United States Patent Application Publication US 2026/0258423 A1 - sequence listing, part 42

SEQ ID NO: 301568 - DNA, 83257441 bp, Homo sapiens (residues 6,404,422-8,539,228 of 83,257,441)
  source 1..83257441: mol_type = genomic DNA
gttctggggattaggacacgggcatctttgggaggccatgattcttgcctactatggagaattccaattcctggaccacacctccctcaaagaagtagctgaaccagatatggagatgggaaagaggatttctggtggcaagttctattgatgctactgactgacacagatgactctacccatctagcgtctcatctgaaagcctaacaaagggattcaccatgaaaaaagaaaaacaagatgggaaatagcacataaaaagtgaacacataaagagagtaaatgcataagagaagaatttttttttaatttattacactttaagttctgggatacatgtgcagaacgtgcaggtttattacataggtataaacatgccatggtggtttgctgcacccatcaacccgtcatctacattaggtatttcttctaatgttatccctcccctagcccccagacccccggacagccccagtgtgtgatgttccccaccccacctgtgtccatgtgttctcattgttcaactcccacttacgagtgagaacatgcggtgtttggttttctgttcctgtgttagtttgctgagaatgatggtttccagcttcatccatgtccctgcaaaggatatgaactcatccttttttatgcatagtattccatggtgtatatgtgccatatttactttatccagtctatcattgatgggcatttgggttggttctaagtctttgctattgtgaacagtgccacaataaacacccccaaagccttcttcattcctttcaacactgtgtctccccataatcagatgtagaacatcagacacaaatcaacatttttacttcgcctctgtgaaccttagtttccacatcggtttgatgggggaataacacctggtattaccagggttacttactggtgatcccctagtaagaaggcaaacccaattggttgaagagttcagcagtttttgcactatatgctacatttattataggcattgacttcaccgtcctgataagagccttggtttcctcatctggaaactggggataataataattctctacctcatagggtagggagggcaggtggcacttgcttctgataggtcccttctttcaaacaagtcaccctctgatgatcagtcattgcctagttgtcaattctcagtctctcacacacacacgcacttcccggcctccttccctctgcccacaagcaggcatggacttccccttccgtggtggagcatccacgagccggttctctgctccccttcattggtgagctcctctaacccacggcctccactattcaccactcctccctcacttaccagtgtttgcattctgtctttggtctgaagctaagctccagatccttcccatggcaacatagccttgtagctctcattcttcctcacttttccacgtgtttgacttggcacaaggccaccttctcctccaggtaagaccacgctgggtcttcagcctgactaagctccccactggattctgaactccagtgagatcaagaggcagtctatctctcccctacctccgtaaacccagggcctcggaacctggaatgcagcaggcttttagcaccgctcaacatgaatgaagggacaaatgaatttattcaacagttcatcactcccagctgggggtggtggctcatgcctgtaatcccagcactttgggaggctgagacgggtggatcaccaggagttcaagagcagcctggtcaacatagtgaaactccgtctctactaaaattacaaaaattagccgggcatgatggtgggtgcctgtaatcccagctactggggaggctgaggcagaattgctggaacccgggaggcggaggttgcagtgagcggagatcatgccactgcactccagcctgggtgacagagcaagactccgtctcaaaaataaataaataaataaataaataaataaataaataaataaataaataaaatcatcactccctgtagctgggctgataaaacataaaattccactccggttcccttgggtgagtgagatgttgagagaccaccacatactggtgaggagaaccaaccaatcacggagcagacagctctgtgagatcccatcgggaagctccgggccctacctgtcctgtgtccatcccgtgaatgacccacacatgtgcggagtgatcactcataaagaaggggacaagggtaattggacctgcgtctgctctaccacggacctgctgtgtgaccttgggaaaggcccatttcccacagagcctgagtcttttctccctaaggacccgaggcgggcagcctgcccacttggttctatgggtgttttccttactaaaaggatcggggcttgaactcaccaggggaatcctcagccagatcacagcccctgggaagtggtgggaaagcaggtgtctggaggaaaggatcaaggcgggcaccgtgagaccccacacccaaggaaaaccggagttcaggctttatccaacgtgttccctcctaacagtagggagggaaaaggcctcctggcctcaggtcagagagggagtcaggtcattcctactgttccaaagaacagagaagtgggctctggtcttacagactggagtaagatggggaggctctggctgctgacttcatccctccaccaacaagagctgcatctggttttatcctgaattacccaagaacaagcacatctttctacaaagaggactcaaagtgctaaatgcaaatgtgatcccagctttggcgtattggactccagtggagcctcttgcattctgtgtgtacccactgtacatgtgggtgtgttgccagcccaaataatcccgttctgctattggaatctatgcccttataggaggaatgtctcccagtctatcctaccacatctcaaataaaagagcaggactccatgagcttgaatgccagtattcatcacggcacactaactactgtaaccaaccacaagaaagatctcaaaagatcgtattggctggaaacagtacaggcttttctctgattcatgtaacagttttaagagtagaccctcagtaatctcagcactttgggaggccaaggctggcagatcaccagaggtcaggagtttgagaccagcctggccagcatggtgaaaccctgtctctactaaaaatacaaaaaaagaaattagccaggcatggtggttcacgcctgtaatcccagcacactgggaggctgaggtgggcagatcacctgaggtcaggagttcgagaccagcctggccaacatggtgaaaccccatctctactaaaaatacaacaacaaatagccgggcttggtggcattcacccgtaatcccagctgcttgggaggttgaggcaggagaatcacaggaacccaagaggtggagattgcagtgagccaagatcgtgccactgcactccagcctgggcaacagagcaagaccctatttaaaaaaaaaaaaagagtagacccccgggtgtccaggctccctccatgctagggttccactgtctcacacaaagggcctcactgatactttggcaacgtcagttaccaggtaggaaggaatcatgagaagggctgctagggccaagccttaagcggcatgcatcacttccacactcattctccctgctggtgctcaggctcaggggcccacctaacttcaagggagctgggaaacacaggccagccctgtccaggtatcaaagaaaatggctttgctgaccacttatctagtccatcgcaagtttccttccaccatagttccaggttctcaagacgcttttaactctccctgggaataaccaagtttatttactcatcctccataatggggtctcctcactaagggaggaaagcaattaagtagcacaccccaagaggtccccacctctaaatccctagctaatcctccattcccacgccagcagctttcctgggaagctgcttctacctactgtcaaaaattggttcccattgagggcagctgttcttaaattaaccaaaacaaggcttagaggggaagaaacatttggagagacagctgatggcttcaatgaatcagaggaagcctctttgctgctgtcatcccgctgccaagcctctgctcccgatgggccaaaggacatctttcatgttctttcctcagatctgaactcggggccgtttgcaagtcccggagatgggggcttctgatgctggccccaggaactgactgggcagccctgaggggccgggaaaagatgcaatatcccagaaaaagaaaaggcatttctaagagacaaatgcaaaattgtcagcaggatgagtacaaagttttgagatcagtgtcacttgtcttgcttagaattccccaaacgggtcctgaaaaggagctgtgaaagaactgaagactcagtgttggccgtttgcaatatttattacaaaaaaaaggacgtccgcagaaggtcgcggtgttcacattgacacagagtatgcagcaggctccccaaggcgacgcatccctcacacactggcaggagctgccacggctacaagaaggttgtgaaaattcactctcatctacagccaggaagtggggattctgccagtgtacagagggcacctgaacacggggctctcagaaggtaaatggaaggtcaggactgctggagtgctgccaaggggtgtacagaggtgaccccagggtggcagcatgcataatgattataacaacaggggccgggcgcggcggctcacgcctgtaatcccagcactttgggaggccgaggcagggggatcacgaggtcaggagatcgagaccatcctggcaaacatggtgaaaccccgtctctactaaaatacaaaaaattacccaggcgtggtggcacatgcttgtagtcccagctactcgggaggctgaggcaggggaatcacttgaacccgggaggcggaggttgcagtgagccaagatcgcaccattgcactccagcctggcgacagagcaagactccgtctcaaaaaaaaaaaaaaaaagaagccactggagtatattgtcgtggtcagcccttcaagggactttatgtgcattgactcatttaatcctctgacaacccattgaggtagcaacagttatgacctctattatccaaatgaggaaacaattgctcagagaggttaagtaacttgcacaaaagcacacagctggtgagtagtcaaactgggttaggaatccaagcccacctgactccaaagccctttctgttagccttcattctattttgatctctgatgtggccttagagataacaggacgggtacctccgagataatctctgagggacccctgagtagccattatcaccaatgagtaacagccaccaccgtcagctttaatttgacaaccaaaccaatgatagcaatggcctcagtgtcccatgcaagaggatcactggggggctgggcacgatggatcacacctgtaatcccagcactttgggaggccaaggcaggtggatcacctgaggtcaggagtttgaggtcagcctggccaacatggcaaaaccccacctctactaaaaatacaaaaattagccgggcacggtggcacatgcttgtaatcccagctactcgggaggctgaagcaggagaattgcttgaacccaggaggcagaggttgcagtgagccgaggtcatgccactgcactctagcctgggtgacagagcaagattccgtcacagaaaaaaaaagggggggaccactgaggaatagtcacctgtaagttttgaacgtcactcctctgtcaccatgcagagggggtatgcttaagggatggcatcactccaggtaaggctatgaggagcagtgacagcagggacaaagacccaactctggggtcagggggcgagctatggttcaaagccagctctggacaagttacttaacctctccagcgcttaaattcttcaaccatagaactggggggtgggggagaatccacctcaaagattactgactggatagattaagttacctgggcaggtgtatccactgagttctggcaggaattcaaagagcaagaatccaatggtatcctcaatttgggcaatttgaggaaaattgttaaagggaactcttcaaaggacagagcaggcaggatatagggaaacagtaaggaatggtgcctgtggcgccccaggcctgggaacagccaggagccgtgaccacccctaggaatgaggggaaccccagaataaagtgtggtcagcagaatgatccccccaccaaagatatctacctcgtaatcctcagcacctgcgaatgagtcaccttccattgcaaagggactctgcaggcgtgaccaagtgaaaagtcttttttttttttttttgagatggggtctcgctctgacacccaggctggagtgcagtagtgccatctcggctcactgcaagctccacctcctgggttcacaccattctcctgcctcagcctcccaagtagctgggactacaggcgcccgccaccacgcccagctaattttatgtatttttagtagacacggggtttcactgcactagccaggatggtcttgatctcctgacctcgtgatccgcccacctccgcctcccaaagtactgggattataggcgtgagccatcgcgcccagccaaaagtcttaaaatggggagatcatcctggattatctgggtgggcccagtgtaaccacaaggctccttataagacggaggcagaaggccgagcgtggtagctcatgcctgtaatcccaacactttgggaggcaggggcgggccgatcacctgaggtcaggagttcgagaccagcctggccaacatggtgaaaccccatctctactaaaaatacaaaaattagctgggcatggtggtgggtgcctgtaatcccagctacttgggaggctgaggcaggataatcgcttgaacccaggaggcagagatggcagtgagctgagattgcaccactgcaccccagcctggatgacaagagcaaaactccatctcaaaaaaagaaaaaaaggaggcagaagagtcagagaaggacatgtgacaacagaaacaggctggagtgatgtggccatgagccaagacatgcaggagcctctagaagctgggaaaggcaaggaacgaattccccgctagagcctccagaaggaatgcaatcctaccaacaggactaaagtcaaccaatcattgattccagtcccatgtgacccatttcagatttctgaactccagaactgtaagataataaatgtgggtttgtagatttgttatagtagcaataagaaaccagcgcaggccgggcgcaatggctcacgactgtaatcctagcactttgggaacccaaggcgggcagatcacctgaggcctcaggagttcaagaccagcctgagtaatatgataaaaccccatctctactaaaaacacaaaattagccgggtgtagtggtgcatgcctgtaatcccagctactcgggaagttgaggcaggagaatcccttgaactgaggaggcagaggttgcagtgagccgagatcatgccattgcactccagactcggcaacaagagtgaaactccatagagagaaagacaagaaagaaagaaagaaagaaagaaagaaagaaagaaagaaagaaagaaagaaagaaagaaagaaagaaagaaagaagaaggaaggaaggaaggaaggaaagaaagagagaggaaggaagggaagggagagagaaagaaggaaggagagagaagaaagagagagagaagaaagagagagaagaaagagagagagaagaaagaaaagagaaagaaagaaagagaaagaaagaaagagaaaagaaaagaatgaactagtgcagggagagcgggtgcagagggctgcctgacagatcagcgtattaaacagtcaggacagaagacccccacctacacaaggaagaaagctgggggaacaaaagccctgaccccactctcctccagcccccaatctcctacaggggcttccaatgggaagaacccactggaagccagagggagccatcggcgtatcacccacaggatcatcttccagagcagggtgcaggaaggagggtggagagtggattgaagagaccaacgggagacaaccagcacagtacggcagcttgaccaaactctttgctggctaacatattaattatcaaagaggaaggggctacatgggagtcttgaaccgggtcccaagaaggaggagcaggacacctgtactccagctggaaattaagactcaccctaccctcaggacagaatccaagaagacagacacagatctggggcacagtggacggaaatcccccagaacttcctgggaaaggggtccttcaagagcctaacagccatgctggaggccagccagtagggtgaccaacccagagaccaccacccctcatcctatcttaaccacccaatcccagtcctggccatccctcctcaatgccatgcccttcacggatgagattctgctgggtacagagaaaagcccagggttccaggcatcagttggggtggtcattgctcctagtttgggctctggccagctgatactgtccagtgtcagatctggacatcctcaggccctgccatcagaaactaacatttcacagatcagcttagctcaaacacagcctcaccactagccaatatggggactgcaaattagaaaaagctacccccttcctcaaaacactttcctgccatctattgggaacttgtagtaactacacatatctaagatagatgacaatgaaattgaggagtagggggtggagacagtgctggaattgttcaatgcacaacctgcacaactgtaagtggctgccattcccaaacttcctccaccacattacaggacttctgctgcaccagcatcttacatgggcctcttctcttccaatgctgctctcttgccgaaactattacagcagtctccaaattgatctccccctttcaatgcaaccttacacctgccacagagacatctttctagaatattcatctgatcatttcccttgccagtggaagcttttcagaggcccctccctggcattcaaggtcccctggatctggtcctgttcaatcttggcagccttttctcccatgactcttgtcctatacaggtacatactggcctccacctgggctctctctgagccctaccctggccgcagactcaccccatattcagtgcctgctctggccttcaacccatgtcccaggcaggacaaatcccaggtcgggtgccaatagccccctcccaagtgagggctgtggcaagctgggacaatatgagatgccactgtggtctaacttcaactcccagcctccgtgtcccagctgtgcccttacacttcttatctcttctcctgtctgggccgctcccattcatcagggacaatgagccccatctgcagaggctgagtatccttcttgagtcccacccactggctcctggcccccctcagactcccacaggtggaagaaggagtttcccaatagtaagaagggccagtccccaggtgcgctgtctccaggctgggcaggagtggcagcagggaccaggctgcagtgttctgaggaccatcagtaattcctcttgctcagagacaagggcaagctcagtgcctctgttccaattacccagagagaggctcactgtggctacataattaatactctaattgggggtcactctaactccaacagtccttcagggagtgttgggaggtggagatatgacataggggaaagacagggaatgatggggtacatcctgtcgcccaggctggacatccctggggttgcagacgctggccctgggagggccattccccagtgtgggaggggctggcagaacagggccaacccgtggtgttcagggctcaggaaaatgttatgaaatacacatctatatcagaaatttgagtcaccccaaattcagcatgtcccaccaccatgctggctgcttagtcttgcacaatcccgtgaaagaaataccaccccagccaacaggggcaacctgctctctaggcttcccttctggaaccagggtcccgccacagggctctgggatggccccatgggtatgcaccctggctctccccatctagtagaccccacagttgaaggtgggaaggggttagagggatagaggataagacagtgcccctaagaacagggaccaaaccaggactattttgggttgaatcgtgtcctcctcccaaaagatgtgttgaagtcctaacccctagaacctcagagtgtgatcttatttagaaacagggtctttgaagagataatccagttaaaatgagatcatttgggggcaggtgctaatgcaatataagtgtccttataaaaagaaggagtttgggcacaaagacagtcacggaaggaagacaatgtaagcagacacagggcgaagatggccatctacaagccacggcctgaagctaccggaagacaggagagaggccagggcagacccttccctggggtcttcagagccctggcgacaccttgatttcagacttcccatctccattgctgcgagacaagaagcttcttagtgtgtggctctgtgactgaagccctagggcactatgacaagggcccacccatgtctcagtctggtcttggggctccctggccagagggcactaggacccctgtccaggctcaggcaactagaaaaggcatttagaaaatgccaagaaagggccgggcgcggtggtgcacgcccgtaatcccagcactttgggaggccgaggcgagcgaatcaactaaggtcaggagttcgagaccagcctgaccaacatggtgaaaccccatctctactaaaaatacaaacattagctgggcgtggtgtcaggtgcctgtaatcccagctactcaggaggctaaggcaggagagtcacttgaacctgggatgcagaggttgtggtgagccgagatcgcgccactgcactccagcctgggcgacaagaatgaaacttcgtctcagaaaaaaagaaaagtaaagaaaatgccaaggaagactttccaaagtgcggggggcccctgaggcccaggcccagggaaggacgccccggccttggtctaaggatggtaaagggtctggcaatatttcagcaaagaaagtgacattggcatgaatggggcctcgtgcccacctccagggatggttctcacccactatcccctggaacttccgatcctttggggggcaaacctgacagttagcaaaaagacccacctttccgcagcctcacctgggaccatggtaagccacagtcccagtctacatgggtctgggggagctgtccagccacatgatgctcagtgcaaaagccaggagcatcctaagcaaacgggctggtttgtcccgctgcatacggccccactctgctccctgcctgcaggggattcacagggaaaacagtgccagctcctcacccggcagtgcctccaccccttgccagtgacacagaatcagttctccatccccttcttcgcctggcagcccccctaagggccctccctatttgcccgggtcactcaaaggggttagcagctgccatggccccctcaccttaccctggaggaggtgtgggccccaaagcccccaggctgtgcttactgtccaggttcaggtcaccctcctcatcctcaccttaacagcctcctctgtggtctctgctttcccctcctctccccctcgcccactccccacaatggcaagtcaacttctgtgaatacaggtctgaccaggccactctccagctaaaagcctgccctggtttcccattgctctcaagaaagcaaccagaatcctcatgatgccacctcggcctttgcagccacgagcctccttgccacaagcatcctgccctttgcttccgtcacttccaatcaatccatttcccagagaggccatcccagtgctcaggctggggcgggcccattccatgctcccccagtgccctgggccttccgcagagccctcatcacacctgcgatggtgggaacaatggtggctgtggctttcttcaacacaccaagacgatgattaatgaccctcagacaaagaccatcaggaccacacctctggttgaacccactgggctcatgggcccttgcacacacatcatggcaactgcgggtgtcccagtaagagagtgctagaaagaacctatcataggattgggccaatgttatacggcctgggagagagggtaaggaagcagggctttgctctgggtggaatgctgtcaagaaggagggataactgattggagatcttcatcaatctcatctagctggaggaagaccagcctacggctgaagctgccattagcaaagaaacctattagtttccccatctgcgctataagatgttgaactaaacgttttctgaaggcccttacccttgtaagaatagaggcatgtttttcagaaagaaatggactcattgagccagtatttctgagcccccggaatgggtcgggcataattctagccactgaggatacagcagtgaacaaagcaggcaaaatcctctgtcctccagagactgtcacactcagtaagagctgccagccccgagactgctgagaaaagacaaatgctccactacatcttcaaatgatgggtggcaagaggaaaggcgagattctttgttcatcagattctcgcactgatgaggatacctgaagtaatggagcaattgtaattaggccaggaactctgtagacttgaaaccaccataaataagaatgctagtttacctaacctttccattaaaacctcaagcgggagaggaatggagaaagaggctgagcaaggagcagccgcctatcccgagcgctcagaggtggtcaagatgacgcctcactcatggaccgttccatcaaggtgaaattcaagacagacgctccaggtacaaaacttggcaagcccagggaggaagattaaaaacccgcatgcagatgtcagctgtcaaagcaaccacacctggactgccacagcgtcctcacaggcagctgacatggtgaggagctgttactggggggaaatcgggacacgggtaagcctcaggcagcccctccatcctaagctccctccaccctaaactattgttgagaccctatagaaacaatggccttgcaggaaactgaaagtagtttactcaccgtgcagctcaagcagcacgagagtggcctgtgacgtggaggcagatggcgtccgagagagactctcagagcaacactacaacagacttgtgttctgcatcacaaagacatcttgtcacctggtccccagctgctcttccacacaaacaccacgccctgtggtggctgtggaacctcccctctccactgttaagacacaccattggccgggcacggtggctcacgcctgtaatcccagcactttgggaggccatggcaggcagatcatgaggtcaagagactgagaccagcctggccaacatggtgaaaccccgtctctactaaaaatacaaaaattagctgggcgtggtgtcacacacctgtagtcccagctactcgggaggctgaggcaggagaatcatttgaacccgggaggtggaggttgcagtaagccgagatcgcaccaccgcactccagcctgggcaacagagtgagatttcatctcagaaaaaaaaaaaaaaaaaattacctggttaatccacattttgctcaggtcttcattagtaaatttaccatggtgaaaaataaagccctggccaggcgtggtagctcatgcctgtaatcccagcactttgggaagccgaggtaggtggatcatctaaggtcaggtgttcaagaccagcctgaccagcatggagaaaccccatctctactaaaaatacaaagttagccgggcgtggtggtgcatgcctgtaatcccagctactctggaggctgaggcaggagaatcgcttgaacccgggaggcggaggttgcagtgagccaagacggcaccattgcactccagcctgggcaacaagagcgaaactccatctcaaaaaataataataataaaataaaatttaaaaaaaataaagccctgaggaaagggtttccttgagttccccccaaccccctgtaagaaaaactagatctaactagagcgccatgctccgatctagttagttcaagtcatcttcaatctcatcacttattggtgatctacaggtggaaggatcccaagcttgcatccaactcatgtgcatcaactctgggctcagccacttgcagctgtgagccaggcagcccatattcctccctaagctgagactcctttgccaaatggagccaatgatgaccacttgaggtggggaggtggcactcacaaagaggtgctgctgttacttcccagggcttgcaccaagcctcctgcagagccacactggtgaaagttgaactgtttgctaagttaaatatgactgatgacccagcaatcccattactgggtatatacccaaaggattatcaatcactctactataaagacacatgcacacttaggtttattgcagcactatttacaatagcaaagacttggagccggcccaaatgcccatctagactagatgaaggaaatgtggcacatacacaccatggaatactatgcagccataaaaaatgagttcatatccttcgcagggacatgaatgaagctggaaaacatcattctcagcaaactaacacaggaacagaaaaccaaacactgaatgttctcacttataagtgggagttgaaaaatgagaatacatgggctgggcgtggtggctcacacttgtaatcccagcgctttgggaggccaaggcgggtggatcacaagatcaagagatcaagaccatcctggccaacatggtgaaaccctgtctctactaaaaatataaaaattagccgggcatggtggcacgtgcctataatctcagctactcaggaggctgaggcaggagaatcacttgaacccgggaggcggaggttgcagtgagccgggattacgccactgcactcccgcctggcaacagagtgagactccgtttccaaaaaaataaaaaagaaagagagaaagtaaaatgagaatacatggacacagggaggggaacatcacatatcagggcctgtcaggggatggggggaaaggggtgggagagcattaggagaaatacctaatgcatgcgggccttaaaacctaaatgacaggttgataggagcagcaaactaccacggcacatgtaatgtatacctgtgtaacaaacctgcacattctgcacatgtatcccagaatttaaagtaaaattttttaaaaaagaaaaaaaaaatctgactgaggttgcctggccatttctcacagacagggaggcgccttggccccaggacaagcaacacctgcacctgtgctgtattcctttgccacgtttgcaactccagatgcaggccaggcccttagatgtcacttctggttagaccttctcccagcaggtggccctgccatggagggcatcaactgaggctgtgggaggcagccgtgtcccaggggctggaaaatgccagctctaatacccatttgtggcatctgggcttaagttcaaattctgcccacacccctgaggagctggagacactgtgtgtgttctcagcctcctcggctctcctctgctccctgcatcctggtggagatgtgatacctgctcaggcagggtcttggcagccaacaggtggcttatgcaaacagagtagccacagaagcagaatgaagatgcgggagggattgagaagccagtaaggaatggggggagctagcaagaacgagcaggggtgggaagccattgctgtgctgaggctgcaggacctggggaggcactgcttggagaccagtgagagccgtggccggggacacctgctgtgaccacaggtaaagagcgcaacccctgccagactgcagcccagcgaggagggaatcagaaaagcaaacagcccagtgccctcctcccgcaagcaggtctcctgctgctgcctcctgccggccaaacccaacgggaaggcagagggcacgggagccgggacatatgtaggctgagcctctagggcacccaccagcgaggcagaggacagatcggagacccacagagactaagcggcagtataatgaaccccctgaaagatgcccacatttgaatccccagagcctgtggataggttacttttttttttttttttttgagacggagtcttgcttcttcacccaggctggagtgcaatggcacaatctcgactcactgcaacctccgcctcccgggttcaagcaattctcctgcctcagcctccccagtagctggatttacaggcacgtgccaccacccccagctaatttttgtatttttagtagagacagggtttcaccatgttggtcaggctggtctcgatttcctgacctcaagagatccacccacctaagcctcccaaagtgctgggattacaggcgtgagccaccgcgcccagcaggttactttctaaggcaaaggaattttgcagctgtgattattacattaagggccttgaggtggggaggtgagcctggattacctggcaggtgggggcaatgtaagcacaagggtccttataagagggagacaggagggtcagggacccgcagaagcctcatggtgacggaagcagagggacgcagagtggaagatgctccattgctgcctttgaaggggccacaaggcaaggaatacaggcagcctctaaaagctgaaataggcaggaaagaaaatggactctctcctccggcctctggaaagaacacagccctgcctgccaacccgttttagaatccctgacctctggaactataagagaatacgtgtgtgttgttttaagccattaagtttgtggtaatttgctgcatccaccatgggaaactattgcccctgcacaatacccgaggaagggggtgtccctcgggccactcagccccttactgctgacccaaaggactccctggtctcagggtgtctgtcaactccagaggtcagtatggtggctcctgcctgggagcaaatgccttggtttggttaactagtaatgattcctgaggacgtgccaggccaaagggggcttcaaaacccacacaaggtcgtttcgtgctgacccttccaactgctcccaaacaaaggctattggcattgccgcaggttgctgcctgatagaagtttcacattctctccttttttaaaaaaaaatgcatcatacccacatacgaagcatccagtgaaggaggcagcacagtatagaaaagaaaagaaaagaaaaaaaagaaaagaaaagaaaagaaaagaaaagaaaagaaaagaaaagaaaagaaagccccagcccagactcctggaaacctgatgctaatcctggagctactgcccctctctaagcctcagtttccccatctgtacaaggggttgggactgagttgcctccaaggacctagtttgctggcagcctcattccatagttctaaatgcctcctttcctgtcatcagcttgcctgaccttgtgacctgcagcgtcagggatggtcagggctgatggagaaccgccacatccggagcccaaagcggccatctcctaccctggggacccgtctgcttggtctctgctgccacctgctggcaacttgaaaacaaagccttccggctggatctccgggaaagaagcccttggaagagaggccctgcaaactattgcaactgcccgcccagacctgaccagccacgcccttcctttaggttggttttcagggagcagaaggaagcccatgcagcaaccagagccctggatgggaggctgcctgcatctctccccatgtctgcctcccgcctcctctgcactaggaagatggggtgtgggatgcggcagtttctgaacagtggttctactggcccagcctctgccttcagaggattgtaacaataggacaagggtccctgtgcaccctctctccagggtatctccaccacatgctatgggcttcctggtccctatcccctttttcctgttttcagacatccagaggcatcagaaggggagctgtccacacgggatgagccggacaggaccaagcccgagcataggctgcattcgggcctctgtccagccagggagcccacaggccacgttctcaccacaaatgaggggggcaccctcgctgctcgttgtccccaaaagaaagggtagctggtaggatagctacattcagacaatggacagggcaaaggagactgggaagtctgcgagccacagtccctggccccgaagtaatgccccttgccaggcccctcatctgtttctgagccacactcgactctggctgcccagacaacatccaggcctttccccgtaggcagcgctgccaggaggcagcagtgaaggtccccttggctctctggccccagcctccctccctgttccaccttctgcagttcgaggcactcgctttggcctcaggacacacctgccttgctccctctgcaggccataacatccccttcctctgacctcttctaaaatctcctctctcacgtggttccttcatactatggcccactggactactgagcctaatcatccaaaaattgaaaccccttttcttcaagggtgggaaggcttacacatcaaaccttctagtactgcaagaaaaaaggaagaagaggccgggcgcggtggctcacgcctgtaatcccaacactttgggaggccgaggtgggcagatcaccagaggtcaggagttcgagagcagctggccaacatggtgaaaccccgtctctactaaaaatacaaaaaattagccaggcacagtggcacacacctgtaatcccagctactcaggaggctgaggcacgagaattgcttgaacctgggaggtggaggttggaggttgcagtgagccgagatcaagccagtgcattccagcctgggcaacagagtgagactccatctcaaaaaaaaaatgaaaaagaaaaaaggaagaggagaagagaagaaaaacataaaacactgccatgttaaaatgtacattatcactccagatgccagaaatatcctcattctggtgtcccaggggtcacgaaattggaaccacagagaaagcaatgcagtggaagcattgcgctgggccctgtggggaaacacacctacacagccacaatcatgcaaatgctgtttattgattttcagattgtagaatcaacctatggacaaagcacagaagatttagttttgcttacagagcagaaggtagatgttaacaacaaggaagatggaaaagtaaagtacatcagaactttagggatacagttagcgctgggggaacccctgctgggtggagacaagctctggggcagaagagaagcccaggaagcccttggcagttgactacgtggccctgggctggatacttcgtcgcccccctgccccaccccacacacctgggtggtgctagaggatgtcgctggcgtgatagcccctcctcgtacccgtcctttagggaggacgaagaggagggagagagttggaaggggaaggtcccaacgctgccatgctcatcagacacagaaggaggtcaccagactgaggcaggcggtggagcttggacaccagactaacttgaagatgagctaaaacaggggcgagtggaagcggctttccctaaggcatgacccccagggtgccatgtcagtttaccattgccgtggcaacaccctggcatactgccctgttccgtggcaaagaccccaggacccagaagttactactccttccctagaaatctttgtatatgcagctccttaatctacatgtaattaaaagtgggtataaatctgactgcagaactgccctgagctgctgctcgctgcctatggggtagccctgctctgcagggcagtcacagagctgcaacactgcagcttcaatacagctgttttggttttggttttgtttgtttttcttttgttttttgttgttgtttttgttttgttttgttttttgagatgaagttttactcttgttgaccaggctggagtgcaatgacgtgatcttggctcactgcaacctccgcctcccaggttcaatcaattctcctgcctcagcctcccaagtagctgggattataggcgcccgccaccacgcccagctagtttttttgtatttttagtagagatgaggtttcaccatgttggccaggctggtctggaactcctgacctcaggtgatccacccgcctcggcctcccaaagtgctgggattataggcgtgagccaccgtgcccgaccacagctgttttcttctaccctaccactggcgcttgcctttgaaatctttcctgggggaggccaagaaccctctcaggctaagctccagtgtcggggcttgcccaccctacatcaagacccactaaagtcagtgggattctagagagctctaagtgtcctgcgtaaagttacaaaaatcaccgagatgacccccaaatgtaactatccaaaatggggagacagggaggggtatcaggcatgagaaaggatcagagcatcaaatcctcatttgtcattgacatggggtaaaatctagaaactgatttaaacagattacttggaaatagagaaaactaccagaagaattaaaaacagggtcaattaaaaccatggcacggaaggaatgagaggggtagaggagaaaactacttttattcataagctcttctgtacccttgggattgtttttttttttttttttaccatgggtgtgtctgactttgatttcaaaaattaattttaaattttaaaaagtgacaccacgatcctggtcaatcgaaccagaagtgaccaggccacttgctccctgcctgggtggctgtgggcctcagggggctcagtgctgcagcgagtgccctggggacgggggtggctctgtggctggctctgcagggggccctgcggacagctctgcagatggtgctgtgggtggctctgcaggtggctctgtggatgactgtgcgggtggctctgtgggtggctctgcgggaggctgcgtggcaccctggctcagcatgttccggcagcgcagccgctcctcctcctgcttctccgccatgcggttctccagcagcctcagctccctgcgcaccgccttctgcatggacggctccagctccagcactttctggaggtccgccttggcctcggcctcattccacacctctgcgtgagcccgggcacgcacgtagtaggccttcacgatgcctgtggggagcagggagcatccagctacagctcccttcccagcctcagaggcagccccagcccagctgggactcaccagcctccaagaccctcagccccgccatgatccttaacctctctgtatcccccatccctcggtttcctcaactgtaagatggagatgatgatcataatagcagtacctcctcctctcctttttaaggccctgtgagtaattttatattcataactttgttttatttttcttatagacgctacctaaattagataaccttcaggccctttccctgcacctccctcatatggtgattatgaggattatgaggattaaatgagataataaacgcagacgacgtgtgcctgatgcatgagccaggggctggatgtttttactgtgagcacgattcgagcattaagtcaatactagtactgacggtgccatatcctcgcaacaccagtactagtaccgacatcataatatttttccctatattgattgcccctcttttttaaacgcctgtttaccgttccgctgaaatcacaagcttggcgagcttcctgggtaagtgttcaaacacacattaaaataaagggccgccccgcgccaagcactgcccatccatcacccacaattcagttacacactcggggaaacccggctgggtggagacaaggtttggtgccctggtggggtggaaagaaaagtccaggaaggctatggcaggtgtctccgtggccctgggctgggcgccccctcactgtccgcccctgcagccccgcgcacctgggtggtgccggagaatatcactggtgtgctccagcacctcatagtactcctccttcttcagcaggcactggcagtagttgaggatcagagtattgatcatcttctccagcttcagccactgcacctcccatggcttctcctgcccagggagaaggtcagccatgacctcaggcagctgcccaacccccgccccaccctggccggcactgggcaggccccccagagtcagcgccacttcccacccctggccagcggcctctgaccttggtctgcaggttccttaggcagatgatggcctcctggtacttggaagaggcctcctcgtagcggcccagcttgaagagccgatttccctctccgtggaggacgggcaccgccttcatcttctcatgattgctcaggttccaggtctccctctggtaatcactcggggcatcaacctggccccagagctgcaggtcagtgaggcagggaccccaggggcctgcaccccatcagagacccgaaaaacaggaccctgtggcacatctccctgaagtcatgcttgctggtcaagtgcatacagacaagggaaagaagcaacaacgccgaaaaccctgccctaaatcaatgtctttgtgcaaactaggaaaaggtgcccgttcatcaagacacttcacttctaatattcagaaaattgtcacgaatactcgttttgttagaacaatacactattgccatctgctggaaacttctcattatggaaataccaatatacaatgtctataatgagcaccttggaggagatgccggtgcaccttgtgcagtgcacagaccacacaactgtgacagcaagcctgtaagggcccttggttgacacagttcttattttatttttattcacccacatagctctcaggctgagcctcagtcttggccataagctgagtcctgacctgaccttgaccctggccctaaccctctctcaccaatccacaaacacgcgctgccaatcactctggggctctggttgggaggatgtggggagttccatgcagcctctcccgccactagagaaccaagtctgaacccacaaaccacaggaaccaaggaggcggttataatctccaactcctgaaaatgaaagtggaagtggataaaatgcctccacaatgaaaatgaatcacatttttaaaaactggttccaagtggactttttttttttttcttttttttggacatggagtctcactctgtcacccaggttaaaatgcactgacatgatctctgctcactgcaacctccacttcccaggttcaagcaattctcatgcctcaaattcccaagtagctgggattgattacaggcatgcaccaccacacccggttaatttttgtgtttttaatagagacggggttttaccatgttggccaggctggtctcgaactcctgacctcaggtgatccaaccccctcggcctcccaaagtgctaggattacaggcgtgggccaccatgcccagcaccaaaggacttttcttgtggaaaaatcagaggacttttttttcaaattcgtattctcccatggcttatgaaccctctcgtattatctaaacagaaacagggcactgtccagtggccagtggggtgggggtgcccatgatgcccgctgtccctctccagtgctggcacagccctccagccctgccaaccccagccccacctgcagcagctcgatcacaaagaccagaggctgaggctccttctgcagctcgtccaggtcctcgtagcccagcgtgtggtaggcgaacatgttggccagcccgcacgtgtgcacgtgccactctgtggggtccttgccctgggccatctgcctcaggctccgggataggatggggtagacccccgtgtgctgtggggataaacggatggatggcatccaggctacctgcccagagctaggtgggccataaaaggcctccactcagagcccctcctgggaggaatcctgctccctcactatgccactcatactaactgtggttaactgtgtgccaggcaaagcacttcacactgttatgagccccttcaatccttatgacaattcaaggcaggcactattatccccattttacggatggggaaactacagcccagagacgcaaagcaacttgcttaaggtcacacagctaggaaatgacgcagccaggattcaaacctggctccagaggccatatgctgttagcctccggctgcctcttctggcccttgtggtccactgtaacacatctctgccccagggaaaccctgacctctgcaaagcctatgactcgcaggaagggcagtgtggggcagtagaaggagcaggactccagggtccaagagagtcgctttggtgtcctggcagtgctgcaggttagcggtgagcccaggtctctgcacttctctgaaactcagttccctgggttgctcctgttcgatattagggctgctgtagggattaaatgagatggtgcagatatagatctggctcatcacagcttcagccagcatgggagctgagtttgccacccttgggatgaaggagggctgggaagatccgccgtgcggcctcagcgaggcctgctgtatgtatgctgggcctcagtttccccaactaggctccctgagaacccatctccttggaccggcttctgagatgacccagcactggccccacatgcaacatgtgaagtgaaggggctgaaactctatgcagcagttcagctctgcctccaggtcaccagcacagagacagaggtcaccctgcccgccccaccggccgggattagcccgaaatgccttctgcctctttatggaagagacaagcagatggctgttgagcctgttgggattagagctggaccaagggagggagaggccccagaaccagcttactgcagggaggggccacctttggccctgactcagcagcccccagctcggcaccccatggctcccagcaagctgagcgtgcttttgtggccccaaagcacactgccctcacttatttatgtcctggcactggctgccctgcattacaattgtttaggtgtctgctcctcctgcagaattcaagttccctaagggctaggggctttgcctgtttcactcctaacatacagcacaggccaaatcaggtgcccagtgaatgttttctaactagataggtaggtaggtaggtaggtaggtagatagatagatagatagatagatagatagatagatagatagataatagatacacgaatgataggagatagatagaagatgatggatgcatgcatagtgacggaagactggattatgaatgaagattggttgaagggaagaatggatgaaatgatgcccgggcaggtgggtagatggataagaggtggatgtgcaggtgaagaactaactctagaaggggtgtgtgtgtgtgtgtgtgtgtgtgtgtgtgtgtgtgtgtgtgcatgcgtacatgcacacaatcacggcagccatgggctggggtgaggagatgtgcggggcatggagattaggaaaacccatagttaccatggggagcagtggctcatgcctgtaatcccggcactttgggaggtcaaggccagtggctcacctgaggtcaggagttccagaccagcctggccaacatgttgaaatcccatctctactaaaaatacaaaaattggcccggtgtggtggtgagcacctataattccagctactcaggaggctgaggcaggagaatcgcttgaacccgggaggcagaggttgcagtgagccaatcccacaccattgcactccagcctgggcaacaagagcgaaagtccgtctcaaaaaaaaaaaaaaaaaaaaaaaacagttaccagcctgtgatatgggcaatgcactcatgtgactatcaacatggaaaaaggaacacagactccacaggaaacaaagagccatgcccacattatgggaatgacaacagcttgtggttttgcaaacaacaaatcaatcaactaatcaagaatttattgacagccttctatgcactcagctgtcatgtgttagcaaacgtgtatcttatggagagggggctcttagtggcagccttgcctcacaaatggcatgaattaaagtacaggagcccctcactctaagcaaagtcaatagatatatttttaaactaactgaaatcacaaagaagccaatttttgaaggcttgacttgataaaaaataaaacagattttaagataaaaacatcagaatgaagaaaaacacagggactgctacaaaggaaagatgttcaacatatatttgctacatgaatgaataaatggataacatgttgagtgggatcacctactggcagaggatggcactgcagcccagctctattagacactgcaagaaatgtgtgtaggatgaagagggaaccaggcatctcacccagatcttttcccttaacttgtctgagccattgcaagttattttcccttttggagtcttaagtttcccatcagtaaagtgaagaagttaatctcaaattttttctaggctggacatggtggctcacgcctgtaatcccaacactttgggaggccgaggcaggcagatcacttgaggtcaagagttcgagaccagcttggtccaacatgatgaaaacctgtctctactaaaaatactgaaaaaaaaaaaaaagccaggtgtggtggcaggcacctgtaatccccagctactcaggaggctgaagcaggagaatcatttgaacctgggaggcagaggttccggtgagccaagatcgtgccagtacactccagcctggatgacagagtgaaactccatctcagaaaaaaaaaaaaattctagctcaaaataatagctctcatttttaattgccctgtattatgatccaccctcatatgttatatcatgtaatctccaaaacaaccccttaacttagagttttgtttatttataaatgaaggaatagagtagcagacagaagacgggactaccccaggtcacacaactaatgaaagacagaacagagttcaaattgtccccaaaatgctcatttaaaaggtcagtggcctctgatgaaataatgagtctgggtatctgccaccaatggtgaaagtctagggggagctttggaatggatggatcaggctgtcaacacctaaacccaccaatcactcttaacatcactgtaaaagagacaaccaagtgtgatgtacgtctcccaaagggaagtatatggtacatccatggcagacttttgaaaaagagagaaagagagagagaagaatctgaatcttatcaggccctctagaccccactttcaatttatcaaaaatgtggggaatagaggagcatgttagacaattccatggcgaaggaaccaggaaaatcagaatgtgggacttctacaggataaatgacccagttccttcaacacttccatgtcaaggaagaaaagaagaaaagaaggaggccgagcgtggtggctcaggcctgtaatcccagcactttaggaggcagaggcgggcggatcacaaggtcaagagatcaagaccattctgatcaacatggtgaaaccctgtctgtactaaaatacaaaaaattacccaggcgtggtggcgggcacctgtagtcgtgggaggctgaggcaggagaatcacttgaacccgggaggccaaggttgcagtgagccaagatcacgctactgcactccagcctggctacagagcaagactccgtctcaaaaaaaaaaagaaagaaagaaaagaaggaagtagacctatagataaaaaggcacttgagagacgcatcaacaaagcgctatgcagagactttgtttgttcggttgttgatttaaacaaaccaaactcattcatttataaagaataaaaggagtcaaccaaagaaaattcaacagtgactggatattagacggctttaaggaattactggagtttttaaaagatttcataatggtacaatggtaaagtttctttaatatcctctttttttttttttaagatggagtctcactctgtcgccagactggagttcagtggcatgatcttagctcactgcaacctctgcctcccgggttcaagtgattctcctgcctcagcctcctgagtagctgggattacaggcatgtgccaccacgcccagctaatttttgtatttttggtagagacggggtttcaccatgttggtcaggctggtctccaactcctgacctcgtgatctgcccgcctcagtctcccaaagtgctgggatatcctcatattttagagatacaaattttagtatttacagatgaaatgatatggtgtctggcatttggtttaaccacgcaggacaaggaagggaagtgggtgggttgggagatgaagcaagaccagccgcgggttgatggtggccggcactgggtgacaggtactcgtaagttcattattctttctgctgacttttgtatatgtttgaaagttcccataagaaacgttgcctaaaggtcagtgagttttgccataaggcaaggaagctaacttataggagtaatttacggagtgccataaataggagggcaaacttgcaatgtgaggaggagggcaaaaaagtgaccagtgctgctctaatcatgctgtataaaatctccagatctaatcatgctgtataaaaagcaaggacttagccgggcaagatggctcatgcctataattccagcactctgggaggccgagacaggaggattgcttaagcccaagagtttaggactagcctggccaacgtggcaaaactctgtctctacaaaaaatacaaaaatgaggtgtggtggtgcacctgtagtcccaactacttggaaggctgaagtgggaggatcacctgagcccgggaagttgaggctgcagtgagccataattacgctactgcactccagcctgggtgacagagcgagaccctatctctctctctctctctctctctctcacacacacacacacacacacacacacacacacacacacacacagatgtgaggactgtgaagtgggccagctcactcctgctggtcatagccctgctccccaccagccagccacagcatgggtcaccccttccagcccttgttccctccatcttcacatgcacagcggtggggaataagtttgcaggactggctttgcaaagcttcgcttgagtcccagctttcccgaaacacagcagccccgcaaagcgggtgggtgagcccagaaaagactagtcccaggagacaggcgcgcagggcctacttacgatggtgtcgcaccagaactcggccacctcgtgcacccgcatggaggtaagcaggatctcccagacctcgagcttgaacatgtttccgatgatgatgtgcatgggctggcccacctgccgactgtcgtcaatgactgtccgctcctcatcacatttcatggtgcggaaatgaaagatcacctagtcaccgagacggtgcactctgctctagacacactgttcaaggcccggcagaagccacccccttgccaccgacacccagggctgtccccagggtcagctcactcagttcaccccatcagatgcctcagacccctggagcacctccaccctgcctgcaccccccagggaggagggacccacccctccctacagaccccattccactccccacagccctgtgcgtccagaaatccttcctcaagtaagcccgagttcttttttttttttttttttctgagacagagtctcactctgttgcccaggttggagtgcagtggtatgatctcggctcactgcaacctccacctcctgggctcaagtgattctcctgcctcagtctcctgagtatctgaactgggattacaggcgcccagcacatctggctaatttttgtattttcagtagagatggggtttcacatgttggtcaggctggtctcgaactcttgacctcatgatctgcccatcttggcctcccaaagtgctgggattacaggcgggagccgcctcgcctggccaaagcccgaattctgtagccacagacgcacccttcagtccagggaagcctaacagacatttggggacaaataccaagactcctcggactccctttcttctcactcaacatttagggccccagaaaattcccaaaagcccttcccctcagcccatgctaaagttgaatctgcaaagtaccaaaaatgccccctgaatgggtaaacgctgggagctccccggaggcccagcgctggggctgcctggctgtttttttggcacagctgaaagctgtttacagtgccttggggcacacctggaatgttgaaagctgctgtgggggaccctgtctgctccggaggggccccactcactcgggatccggtgatgaagtttgggagctcgcccgtgcccccgtgcagaatggttttcttgaccccttccacgttcaggagcagagcggcatccatggctgcaggagaaagggaggtgtccagcacaggcggagataatctcacctccggggaagacacttaggcggctgagactctgggatttacccagccaggaggagtggggggaagggcagacggtgggggcggtgacctaggcgccccggcttctcatcagagccactcgggccgggcctgtggtccacaggcagcctcgcctcctatcccatccacctttgcttccagtgattctgggcccctgcccagggttgtgctagatttggctttttgttccaccccaagaaggaaaaaggtccgctgagctttcttaaagaagacaggggaccaggcgcggtgactcacgcctgtaatcccagcactttgggaggccgaggcgggcagatcacaaggtcaagagatcgagaccatcctggctaatatggtgaaaccccatctctactaaaaatacaaaaattagccgggggtggtggcgggcgcctgtagttccagctactcgggaggctgaagcaggagaatcgcttgaacccgggaggcggaggttgcagtgagccaagatagcgccactgcactccagcctggcgatgtggagagaggcctggaggccactgaaggggaaaaggaggggaggcatgggctgggcccagactctaagtccccgaggaccccaggccagccggggtgacagctgccctttgccatccagccacctttctgctttccctgttccccctcccctccccagaatctgccttcaggaggccctgcgatggtggcccaaggcaagaggggacaggtttctggcttgggagagaaggaagacggagaacgaaaggcggggtgggtttgggtaaagttgaggcgccctccgcagccccgctcctgcctcccctgcaaggtctggctgggggaagggtgggtatcccctcccctcccctcccctcccctcccctttggaggcccttagccctgtgccctgggaaccaggcagagtttattgagggcatcagggacgcccagaagggctgggaaacataaatgcgaagacctggtgtttggcaccaccgtgtggccagttcaagctcctacacctccgcaccctgagggcactggactcagctccacgaaaccattctcttcctgacaccaggctcaccggttgcagagggaaggggtgcaggactctgctacagggagagataaaaacacgggactaaggaggctgaagtaggtggatcacctgaggtcaggagttttgtatttttagtagtctgtactaaaaatacaaaaattacccaggcatggtggtgcgcacctgtaatcccagctactcaggaggctgaggcaggagcctcgcttgaacccgggaggcggaggttgcagtgagctgagatcgtgccactgcactccagcctgagcaacacagcgagactctgtctcaaaaaaacaaaacaaaacaaaaaatgctagactaggctgggtgcagtggctcatggctgtaatcctaggactttgggagccaaggcaggtggatcacctcagatcaggagttagagaccagcctggccaacatgatgaatccccatctctactaaaattacaaaacttagtcggatgtggtggtgggcacctgtaatcccagctactcaggaggttgaggcaggagaatcgcttgaatccaggagatgaaggttgctgtgcaccaagatcatgctgctgcactccagcctggggcacagagtgagactgtgtcagaagaagaagaagaaggagaaggaagaggaggaggaggaggaggagggaagagggaagagggaagagggaagaagaaggaagaagaagaagaagactggactgagccagatacagctaagttcaaagggctgatcctttcctatttactgaccttgttgccttggatgtctctcgttttctctaactgcattttcccaactgaaatgagaaaattgacctctcctgctccttctcaggggaagttgggagggctgcagcagtgaatggcaccctgaaatccggcactcatgaaagtcttgcttcccgtgaggagtcattggcatagaggagaccaaacctgggccaactggtcaggcccagggaatcctggccagatccccaagggtccagtctccatccctggaaggcagaaggctgctgaaaaccttccccttctctcttccatcctttctccagccacacggcaacctagagaggtctgcatgcataggtaaaatggatacttagtaaaactaatacaggaattattaagaaataatttttaggcagatagtaagggtaaaggttcttggtggaaattttcctgcaataaaaaacaagcccccaaaccatctcttttctaacagaaaaggctgcttaaagggccaggctggcaaaccttgacatgcaaatgctggccattagaaactgggttcactcatatggagattcctgctgtcttttccctgtcaccaggtgtaccgagtgtcgtggccacctccagataacaccttgtgttcagaacatcatagcgacccacatttgcatattaaaggactaaggtgggaaggccaggtgttttgcggggtttgtaaatgacacacctggtcaaaccaatcccctgggccctatggaaatcagacaccacctcctcagcctcctcatataagcagctacttcccaccaccctcaccctaaacagggggttttctctttgttcaaatcccccccctctgtctctgtatgggggggctattctcttcttccttccttctttcttgcctattaaacttttcactccttaaaactactccacgtatgttcgtgttgttaatcctattggagcaagaccaagaaccctggagttcctccagtcatcagagccgtatcaaaactacaaaggaaaataaaagtatttatcataaaagtctaaggagacaggaagaacacacttgtcacttgcgggtggcaagtgtctgcttctgggatgctggcagtgctcacccttgacctaggtgatggttacatgggtgttggctttataagtacagtaagtcctcacttaatgtccttttaggttcttggaaactgcagtctgaaatgaaaggacatacatcaggtcctcaaataacatcgtttcaatcaatgtcatcatttcattataatgttgatgagaaaaaaaggtggtttccttatatgtcatttcatttaaagtcagtcttctttttttttttttttttctgagatggaactttgctcttgtcacccaggctggagtgcaatggcgcgatcttgactcactgcaacctccacctcctgggttcaagtgattctcctgcctcagcctcccaagtagctgggattacaggtgcctgccacttcacccagctatttttttttttttttttttttttttttttagtggatacggagtttcatcacattggccactggccaggctggtctcaaactcctgacctcaggtgatccacccaccttggcctcccaaagtgctgggattacaggcgtgagccaccacgcccggcctaaagtcagttttcaaacacctattgacagcattaagtaaggactcactgtattcatgacactagattttatgtcttaggcagttttctatcggtgatataattcacagtgaaaaggatccaatcatgtctcttctcacacttcttaaaactctcccactgtttctgttgtttccctttgtagagggtcgaagggcacacacacattgcagagatgtttaaacagtagaactgatagatgtagcctgtagctgattgggggatgtgggggcgagaagaaaaggggatgttgaagccgatgccaggggggttggtttccctgctgagaagaatgaggattcactcctggtctgtgcctggagttgtgccacaggctacagactgatgccccagaaaccctttgccccctgtcttagttcattttctgtgattataactgaacaccacagaatgcataatttatttttttaaaaaagacatttatttagctcatagttctggatgctgggaaatccaagagcatggtgctggcatctggtgagggccttcttgctgcatcataacgtggtggaaggcatcacatggtgagaggacaagagcacgcacatcagctcaggtctccattcctcttcttgtaaagcctccaatcctatcacagggtcctaccctgataatattatctaatcctaatgaccctccaaaggtcccacccataaatatcatcaacatacgaatttgaggattcggtttccaacagatgaaatttgggggacacattaaaaccatagctgctcccaaaccagtctcctcatggactttattaaaatgccaatctaataacctactgccctcttcaaattcagcaaagagttgccaccaccttcaggacaaattttaagctccttctctggcctacagaccctgtctcttgccaccccatcccctaccctcagcccctcatctcagccccaccctttttgtctaggctttccccagtcctaacgcttggcaatgctccagactcccaaccactggcccactagctcctcacttcaaacaccacacattcagggaagactaccctgacctccagctcctgtcaatctccccatgccccttataccctgtcacttctccctagcactgcacattcatgctattttgccccattgtaattgtttacaatgatgtgtttaatgtctatgtcttccatcagattgacagtttcaggaggtcaaggaaactagtggaatgtttgctcttggacaaagagcccctggagagcagggctggagctcctcgtttgtccccctccccaacggaggcaagggtgatgctggattccctccccctccaaaagcctctgctaggaaaaagtgactggtttttcctccttaccaagaacagaagccaatgtaccgacctctggactaggagcctccttcccctgagtacagcctccttccctccctccagccaccactccacgcaaggcaaaagggaaaggcttcccattcataagaaaatgtttcttccccctttacttgttgccatggagactgttcttcattaacctggcctgccagttaccattctgagtgagggaagatggtggaaagctccaagcagggagggcctctttatgcatgcatgcattcattgtttcacccctgatcttaacaaagttgtgtaatctaagggtaagaattcaggctttgaagtcagtcactggatttaagctccagttctgacatcccatacaatcttggaccagatatttcacctgtctgcatctcacttttgtcatctgtaatggaaataaaaaacgtacctacttcatagaattgcttgaggattaaaaaagaataaagaaagtaaatgcccttagcagagagtctgacacatggtgagggctcaaaaaatataagctattattacggatgcctgtgacatgacaggcactggggaggctattgtgataagacactccggtttgagagacttggcttgtttctaaatgtttcaccttcatggagtctttcccacactttcatcttagttttcatagaaacaacaactttttcttttcccccttggatttcactggtaaaagacatcagttaaattccttaattacagtaacaaatgcaactgttgtaaacaggtttgaaaacaagcatttctgactcttgataaacaacttcactgtgaacaaaatggacaggcaaactagagcaatattttgcaaaccacaactcatactccattagtgactcgtagaatgaatatagtgggttgtaaccatcaaggtttttttaaatgaaataaaaaataaaatctcaggtcatatcacacatagtcaagtattgtttcatgaaacttttgtttcagttcacgtgtgtgtgtgctgggtctcttacagtgaatgctggttccttaagcgtggtgttccctgagccaagaagatcacacacacacacacacacacacacacacacacacacacacacacacacattcgttgcctggttaactcattctctaggtctcagctttcaataacataagttttgcatagttctttgattaactgattattggttatttgatcctttcatgtctatgtctccccacacactagatttgagctccatgacagtaaggaatgtatctgttttgttgacctttgtggcccattttttagcacagtgcttaatggatcacaggcaagagggaatatgggggaggaggaggattgaggagaccagggtgacttcagctagggtgtgtttatctaagatgcctgcagcattcaagaggagatgagacccaggaggtagttggctatacatgtcagatgagaggctcaagctgggggtggaggtgttaggggctgaggaaggcagtgtggtgtggtggttaggcacagggaccctagccctagactgatgaagtttgaacccttggccctggtgtagactaactgagtgaaatttgggccctaccaaattctgtattctcagcttcctcatcaagtgtaggtacaatgaagatgtcagtccgttttctgttgttatatctgaataccacagactgcataatttataaagaaaagacacttagctcatggtctggaggatgggaagttcaagagcatagcactggcatctggttggcatctggtaagggccttcttgctgtgttgtaacatggcagaaggcatcgcatggtgagagggcaaaagcgtgcctgtcagctcgggtctctcttccccttcttttaaagccaccagtaccatcatgggggccccatctgtttgatcttatctaatgctaattacctcccaaaggcctcacctcatcaacatactggacgttgggaatggtaggtgcaaggaaggaataggagagatttgttaaaagacacaaagttacagctaaataggagtaataagcttagtattctatagcactgtggaatgactagagtgaacaataatatatagtttcgaataactagaaggaagatattgactcttaccaacacagaaaaacgataatgtttgagatgatgaatatgccaattacccagatctgatcactctacattatatgtatcaaaacatcactatgtgccccataaatgtttaattattacttgtcaattttaaaaaaaattttaaagaaaattacaaagtagctcatacttagaaaataatatatgtacaggtatgtgtatacacacgcatttataaagtgatacgtataaaattacttacatatatggtttaaagaataataaagactaggcaaggtggctcacgcttgtaatcccagcactctgggaggtcaaggcaggaggactgcttgagcccaggaggttgagactgcagtgagctatgattgtaccactgcacctcagcctggacaacagagcaagatcctgtctaaaagaaaaaaaataaaaaagaagaaagtaaacatccatgtggccaccacccagcctacaaaatggaacattatctttgaagtcctttgagccctttcctcattacatcctcttctcctgccacccttccaaaaacgacgacttattttattttggtgtttcaattcctttgctttccataatagctttgtccacaaatgtatgtgcatattcctaaaccatattgttgagcttttttgcgtttgaatttatacagtgtcatactttatgtttgtctgcatattgcttttttttaatctaacatatttctgagattgacttaagttacaccatctggctacaatttgcttatttttcagtgctgtataatattctataatttgaataaataacaatttatatgtcttaaaaaatgccaccgatagccaggaacggtggctcacgtctgtaatcccagcagtttgggaggctgaggcgggtggattgcctaaggtcaggagttcgagaccagcctggccaacatagtgaaaccccatctctactaaaaatacaaaaaattagctaggcgtggtggcaggcacctgtaatcccagctactagggaggctgaggcaggagaatcgcttgaacctgggaggcggaggttgcagtgagccgagatcatgccattgcactccagcctgggcaacaagagtgaaattccgtctcaaaaacaaacaaaaaatgccaccgatatatgaatttgggcattacatttccaacatgtgaaatttgagggacacattcaaaccatagcagaggatcaagtaagttaataaactgcaacaccggtacctgtgcatactaagtgccatatacacgttaatcattatcatcatcctttccttggaaatcactgaggccaaaggagtgggtgagaccacccagaaacggagagggctgaagacagagtctcaagaagccatcatctcaggctcttgtgcggagaagtaacaaagaaaccagccgggggagtgggcagcactgctctgaggtcaccgaaaggagaaagatgagctggagagagctttataatggctgcatttgtttggatgctaaggagaagagaggcaggcattccgctggagagagggagggatgcgtggggcaaggcgggggcggggagccggtgtagacgggtggagggcagaccggtactctggtctatccccgcttccgggacgcgttttctagggagggcggagcgtggatggcgagtatggggaactcagagagggacagtgtcttgtcacaggaagggagggtcaggagggaaatttgaaagaaaacgtctctgggaacccagggctctgcactgccagtccctggctccttctgacaaaaccactgagcaagaaggaaaagccagaccccttggcaggatgagaggggtctctgcccgctgccgggcctggggcctggggcctgagccaggaggcctaggtcccaggacctccgcctccaccccatgggtcagagcagcctgaaccctgtgcgcgctccagggaggggacccggtgtgcgatgcgcgggggctgggctagcaagggcagtggcgcgagcgggacgcaggatacaaagcccggagccacgaggctggcggcggggcgggggccggagcgatgaatgggcacggccgggccaatccaagcgcagcatttgcagccgcgagagagggagccaatcggatccccggggcggtggcggtggcgggggcggggacggaaccaatcagctgtgaggacggggccgggggcggagccgcgcagagtttcaaatcggctgcggtgggcgaggagcagctgtgctgcggctgtgctcggccttagtggtgtcgggtgagtgcgggctgggcacaagtttcgcccttgttgcccaggctggagtgcaatggcgcgatctggactcaaaacaatttttttgttcggaggggagggcatcaggttctgttcacaggggagggcatcaggttcggacacgcacggcctgtggggtcgtctgggtaccacaagaagtcggatcgaaatcggggcgtctggtgggaaggccggggtctgggcgggtgcgcgtttggtctgggcgagctggtgaagaagatggtgatcgtgtcctgggcccagcgctgaagctcggctacggcgtgtcttgaccctgcctcccctcctcgcctgagccagagagaggaaggaggttgggatgaaaagacagctgttttggaaacttgaagggcgggacatcagaaatgctgctgacccgaggcccctcttccaggaagcatcctccttcctgcacccacacttaccaactcgcccgcccccgccaccccgctgcatcccgtctcttcccctgtgtccagggtctctgtggggcctgggaatgggtatggggaatgccttgctgatctgcctttcgccctcctccccagggtctagtggacagagaagactcttggccaggcagatggcttctcggtggcagaacatggggacctccgtgcgccggagatctctccagcaccaggagcagctggaggacagcaaggagctgcagcctgtggtcagccatcaggagacctctgtaggggccctggggtccctgtgcagacagttccaaaggaggctgcccctgagagccgtcaacctcaacctccgcgcagggccctcctggaaacgcctggaaaccccagagccaggtcagcagggcctccaggctgcagctcgctcagctaagagtgctttgggtgccgtgtcccaggtaatactgacaacactaatcatcttttttatggagtgtttccttggtgccaggcagttcctgccctcaaagagcctcaagaatatagacttcatgaaaacagggacgttggttagttcactgctgtttccccaccaccccagatagttcctggcacatataggtgctcaacaaatagttgaatgagtgaatgaaagcatgtcttggaggaaacagatgctcacaataccaggtgataagagctgtacgtgataggaaattgcaaagcaagtgaccaatagtgaggctcaccaaatgcaagcttagtcggtgaaggcttcccagaggaggtgattccagagttcacccagggaagcaaaggtcaaggggtatttagggtaggggaaatagtgcaagtccaggcctagagctgagggaaagcaaggtgtactgcccactcagctgtgtatccctgaggagagccagaattgtagtctgggtatgaacagatgacagagagcaaggtagagcagggggaaaggatatgaaggagcttagaactctcccaggaatgatcaggagtccggaagattctaaacagtggaaagtctggtctaattagcatattagaatttgccctttagctacatgatggagaagggaatagaggcagagatgctcctgatggagactaagggtttggacttgcaggggataaacttcaggagctgccgagaaggtccagttagaggggatttgctgtcaaatgagagctgctgtcaggaagacgtccttatattggatgtaagtgtctgtggacccttcaagggatgcatctttaaacccagagctggaggtgtagacgtgtcacttagaaaggacagaagccattaggatgaacagacctccagggagaggattgggggctgcagaggcttctcctcggtgtctcattgggaattctgaagatgaaagaattctccagaaagtgggtggctctttctggaccctctgcagagagctctctgagccaaatgttagtccttatttggaagcactttttgattgttttcaccaccctcagggatcagagaaatgaaatgaatttgtccaaggtcacataactcatcaaatttaacttgggcttcgctccaaacactgggctctggcttgtcaaggcaaagacagtctagctgatgaagaagagccttcacggctgtcacccggctggtgtgaaaggcccaagagttggggcttggtcctatgggcaacaagaagccacagaagagttttgagcagttgagtgtcacggtcagaactgccctttagaaggatcactatggaccactgtggagggtggatagagtgagtgagacccgaggcaagaagacaggtgctctcttggtgtacagggggtgctgggcggggtggcctgttcttttggggccctctccttcagtcctggggtcaccgtctgtctggaaagagagtttggacttagacaaacaggctccaggcaccaggggggtcctcctgcggctgactgctgctgtcatatccaagagctctgagctgggtcccagccgtggactcattccatgaggagtcattcacatccttcaccctggagactaacaatagcctgtatttacaggacacttgctgagtgtaggggttgcttgtatggtctggagaccaaggtagctcacccttggtttttttttttgttgttgtttgtttgttttcgagacagggtctcactctgtcgcccaggctggagtgccatggtgcgatctcggctcactgcaacctccgcctcccgggttcaagcgactctcatgcctcagccacccaagtagctgggattacaggcacccgccaccgcgcctggctaatttttttttgcatttttagtagaaatggggttacaccatgttggccaggctggtctcaaaatcctgacctcaggtgatctgcctgcctcggcctcccaaagtactgggattataggcgtgagccaccgcgcccggcctaacttttggttttgtctgtgctaacctttccatttgcctgttccagagaatccaggagtcctgccaaagtggcaccaagtggctggtggagacccaggtgaaggccaggaggcggaagagaggagcacagaagggcagtggatccccaactcacagcctgagccagaagagcacccggctgtctggagccgcccctgcccactcagccgcagacccctgggagaaggagcatcaccgcctctctgtccggatgggctcacatgcccacccattacggcgatcaaggcgggaggctgccttccggagcccctactcctcaacagagcccctctgctctcccaggcaagtgggatagtgcttcaccccggggctggtggccttttaacctgggcacaatccctgctgtctgacctcccagacaccaactgggccctaggggtttcttggcaccccctgtggctacctggagccaggggcaccctgagcagcgtcatattgtattattattattcttactgttaaatgtgtgtcctgctttagcagatatccagtgcatgtatttgctcatcagaaaatgagaaaacaggctgggcgcagtggctcacacctgtaatcccagcactttgggaggccgaggcgggtggatcacctgaggtcaggagttggagaccagtctggccaacatggtgaaacctcatctctactaaaaatacaaaattggctgggcgtggtggtgcacgcctgtaatcccagctccttgggaggttgaggcaggagaatcgcttgaactcgggaggtggaagttgcattgagctgagatcgcgccactgcactccagccagggccacagagccagaccctgtctcaaaaaaaaaaaaaaaaaaaagagagagagaaagaaaacaaaacaacaactagattcctaaggattgtatttcaactttccggctgagttctagggggaaatggagtgtgttagttaaggctgcatagtagcttagggctgttgaatttttccccagatttctttgagggctagcatctttctttagcctaataggaactttgagctgtaattaaggcaggctctgtttgtcccatttgacaggtaaggaaacggaggtccggaggggtttggtgattagcctgagggtcatcctgtaagaaatagaggagtaaaggctggggtccagatcatctggatgttctgccccaccgatcaagctggcctgccttgcagaatcttctagttctcagacaggcccagaaagtggcctggctcagggcagggggtgaagctcatcccaatcggcagtccctggcagtttcctggtcccatctcggagctctcagggaaggctgcctagccgctgcacctgtgttgtggcaggtagtcaccaggatgcatgtaagtgaccaggtggctctttgcaaacctgtaagctaaaataaggcttgtgtacacttcaaaaatactctccacatctgtattctgacccggttccgcgtccagagccagcaggggacctgagaaaatcctttaggaccttagtttctctgtccgtaaaggaagagctgagtttagttctgacacaatcacactcacccaagcctcctagtgagcccagaagcaagttttgaagccacctggagagctgaggctcagtttccaagtggggaagctgcaaaatcacttgcccgtgaccttggcctcgtggatcttgatcttctctctgtttgtcgctctgaggtcacctcctggagtgagggtctggagtgaagcccagcccgccagggtcatctgggcccacagaccacaccccggtaccgggttgcaagggtctcctgccgggagtttccaactagtcactggtgtggctttttctttcatgcagcgagtctgacagtgacctagagcctgtgggggcgggaattcagcatctccagaagctgtcccaagagctagatgaagccattatggcggaagagaggtgagttggcatcccatgcttcaaagtgaaggggccgggagggcccctccagccatctttgtaggcaggcgttggttctgctctgacctgctgtgtgaccctggccagtctctgcccctctctgggcctcagtctccctcatctcaaacatgagaaaggacaaaatcctggactggggtgatggtaaaggatgtagcctgaatgtgtgtggtcttctgggccttgggaccccatgtttgtccatcacttggaacctcacgtgtggctggttcctgaaaaacctgcccttcctccagaactctccgtggctcgtctgtgccctgcctgcctatggaattgggaaaagcaacctgactgctatggagttcctggtctgtctgctcatggccccatcctgggggcagggcctcggttgtggacctcccctaacttggggctgtttccccattccacttgtataatggccatgatgggctctaaggctgggccctgccagctctatgtgttgaggggccatattcctaccacatttccgggtctgatcttgtgtagctcaggctgggagggccctctcagagcccaccacacccagtggcatcaatccctccccttctctctagtggtgacatcgtctctctcattcatgactgaggaagtgcctgcaggtaatgcccacctcccaagagtctttctcactgtccttctcctccatctcatgcatgagcaagttaaagaaaaagcccacagagctgatgggcacagcagagtaggtagtacctacttgccgcttgaagccagagctgctaacctcactgaccccgtcattaacagcacgctgggggccccaagtagctacagccaccttccagcaccccccaccccgcagtgagcagggaaaggcatccctacttctcctaccttgagcacagtgaaaaaggcagctctgtcttgaaggaaacaagccctgtctgaccgccaaggcttcatactcaaggatgtctatgcttccccgtgagcttcctggaaaaaacccccgggagtcgtcagtacccctgggccactgctaacaagcacctaacaaggggcccagagccccctgctccagccacatctggacccatcagtgactgcctgccatagcctgagagtgtcttggggagaccttgcagagggggagaattgttccttctgctttcctaggggactcttgagcttagaaactcatcgtacacttgaccttgagccttctatttgcctcatctataacatgaagtgctagcatcagatatttgagagctcttagctctgtacccgggtgcctggtttttggggagtcatccgcagagtcactcacccactgtgtttctggtgccaaggctcttgagggccccactctcatccctcctttccctaccagggactcggaggaaggcataggagatatttccaggcttacgaccctgggctcacgggtacctatttatatgctcagtgcagagcactgtggatgtgccaggaggggtagccctgttcaagagcaatttctgccctttgtaaattatttaagaaacctgctttgtcattttattagaaagaaaccagcgtgtgactttcctagataacactgctttctcataataaagactatttgcatttgacatctgttccctttcaccggcaacctccaacctcccccgccctcccacaccactctgggctatagatttgtaatttgtggtttggggtctggccctcatccacctctgctccgagccagtctgcccccaatcccaccccagggagaacatgtagaaagggaaaggtttctcaacttagttcagaccaaaacacattgtaaaggcaaagaaggtttttatttaagtgacaacatttgagagctaaaaaccagctcacatcaaaatcaagacccagttgtaaaaatcttttaactccataatgctgtttttgtcttgttagaaatctgatatcttacattagcgtttctaacggattttgtacaaggcagccataaggaatataataaacctttttcaccacagaaccatctgtcacagataatactgaaagttacacacttaggaacagtcagaccacagacaaggtcagactggctgccaccaccaagtaaacaactagaaaaggacagcggggtccaagggtgggggtccctgtgcacgagtcgccctcctctggcctgccccccctcgggtcacctgtttctcctttgccccaaagagggtggagtcaaatgcagattttcctcccaactgcctgttagtgtctcaacaaggagagcagagcccaggtcaggcctcactgcttggacttaaccctaactatgatttttacgaaggtttcccccaagcccggaaggaaaggaaggagggaatgtttcttttggctgagccaaaagacaataggtttccagggcacttggcacccaaaccccccccccccgcccgccgatgggattcggtgggaaagttggttgtttaaggcggggtcagggcacccctcccggggctgcacctgggctaggggggagagtgaggatgcagaggacccacgtgcctcatgaaagactccagggcacaggtatgggtcccaaaggggtaaaaatacagtttaaaaaccgtgagatccagcctcgcctcttctagacagcccaccgccaggaatctctggaatactgggattcaaacacatttgtttgctgtagcccagcacccagacaagagggccgttcatcccaatgcatgaaaggagtctgcttttttaaaaaagaaatattttatggagcccaagggagccgttgagatctttaggaaaaaacccatgatgctggaagagcaggtcctgggctaaggatgcaccctgaaccccaacagggcaaatgataaaggaaggtggcaggcaggccctcggctacgacagccaccggatcgggaagaacaaacatgccacgcaagaaacaaggagctttggtcaggcaggaagatctgtttccagctgctggagagcaggcataccagaagctagaaggattctctacaaaacagctggattgggggtcacagaactactcaaggagaggcagcagcaccccctccagagaacaacacaacttggttctttctccaacttaaccggacagacaaaactgagcaaaccgctagtgtagaaagagcatatgcattacacagttgccgtgaaagcagtactgaaacataccttgtctcgccactaaacagaaccgcaggtacacactcacacacgccaactacagctccagttgttgcgttcacaatatctcaccgtacaccatcagcatcttgtgtgtgcatcatcagccaaagccccgatcctcctacctgattgctgcttggaaccagagctgtttccaaaaggaaggggtggtggccctcctgctgggtcctgtgtcccagctctgaccccagagccacagaaccctggtcacactgacttcaaattccccagggatcctggctcatgagctctctctctctcttcctctctctctctctcttcctctctctctctctctgtcttcctttctctctctctctctctctctgccttcctgtctttctttctccctctctctctctgccttcctctctctgtcttcctttctttcctctgtcttcctttctttctctctctctttctctctccctctctctctctctctctccctctctctctttctctctccctctccctctctcgcctagcctggggttctcagggaagagggaatgtaactgggagcaaagtaccccatactaattattttatcattttagtgtaaccagtgccttctgcaagaaggagatggtagagttttcaagaatcagactaagtctgcccaagtttaaatcaggatatttgggggaaggattagggttggggtggctatgccatatgagctggtgcctttggaaagccaagaactgtgaaatgttaaaggggggatgggcacctgtgaaccgccaggagacaggaccatagaggaggctgaggctgaggctgaggctgagcctgatccgcactcctccccatagactcgccagcagccctgggcttgagtgcaggatgcagcactggaagtagagcagaagagctggcagactgaagacacatttctagtggggagagcagggatgggggttaggagcccagacccctccagccccaggagggcacccaatttgccaggcaattcacaacggcggtgccagccgcccccaccagcagcgtcactggctgcatgggagccgcgagaggtagacattgagcagaagcgacactgagctgacacaggtgcctgctgtgtatacagacgtctgggccctggggcagcctggctgaaattgctgggaccggccttgatggcagcctatgggggctcagtggccacgtgggcagccccacacagcaggtgtgggcctgggccagggagtcggggttttccaggatgcaggaaagcagtgcccaggccaaggttcagcagcaggagggcctgagcaggctttaggggccccagaagggccaagtcctgccaacctcaggggactacccaggaggaggttatgggcacaaactgagcagcaggggaaagggaagagaatacaacagttggagccaaacttccaggaacccctagaaccctggaatctcagctctatgcctctgggagccaaaaaggataaaagggtcctggcagagctggggttatggggagcccaatcagtaaccttttggcaggagagggaggtgggttgtccctaggacacccagtttgagtgggttgtccctgggacacgcagtgcaaggcaaaccagctgcacctctccgtggagtagggatcccttcccagcccacccagagaggctcctttaagagcccctcctttccagcccacccagaccccctctcccaggctgtgtgaaaggtgtgggtcacaggacactcggagggacccttaggcctgaagagcctcaatgggccaaactgcaggacatcttgggagtcaaagactcacaccaatctcagctagggggacccctccaataacagaaggaagacggagcccagagagggcaagcaaccagctcaggggctcacagccagcccagctgagccagagcccaaggctgcagcctcccaagggagggcatgaggcagggctccgggaagaggaagccctggcctccagggccacagggaaatggtgaggacactgaggacaacgggggttggggacaatggacagctgcaggacagaccgtcagcaccagaccccacccccgagggctgtggacagagacggcgtaacatgagcccggggatgtgctctcactcccagaaagtggccatcttgccataagagcgccaaccccaaaatggtgacccaaaccacaggaagggcgggcacaaatgccactcacacctccacaagacagcccagaggctgtgcctgccagcggcgcttggtgccgaggctggggctgcccccttgagggcctgcctagctcgctgtgaagcctggggacgcaggagggtggtcgactttgcccaaacgcttcagccccgggcaagcctgcccccaggatgacacaaacatgaaccctgacttgggcttgcggtcgcaggcccgtgggaggcagcagtggctgcaccgagatccccggacctcaccccgtcgcagctcagggagccccccgggctcgggcaggatccctccccgctctggtcggacactgctggacagacacgggagggaaaaagcaggaaaacgcctgtgtcggggagagggcagccccctcccgtccccgcaggcagcctgattgggccccccgctccctgctctgagcacagcccacccctcagggcaccgactcgaacttggggggcccacgcgcccagctgagcgccggcagcggccgctcgtggtctttgtccgactcgggctggctctgggcccgctcgggcttggggttggcggcgggcgggtcgggctgctgcactgacatggttctgcgcaggtggttgcgcttccgcaggaactctggctgcgcgtgcagcccgaagctgcccttgcgcaggatcatgcgcgagttgttcttctttgggcgtgagcggtggctggcctccagcgcggccaggtgtgcggcgtagccctcgctcaggaactgcggagggcaggggagggcaggggagggcagggcagggcagcagcgcagggggaagaagggaggggagggggaagaggggaggggaggggaggggagggagaagaagggaagcggaagaagggaagggagaggaggggaggggaagggacaggcatcaggcggaggggtggggcaggccccttatcctgatcctgtccccatcatttcccgggaacactctacggaggcacctccagcttctccaaggaaccctggggaagtcgggagctctttactgttccagggtccccatcctgctttggacaaccatgcatctctacctgtacccatgggtcacaccagagttctctggattttctttcctattttattttaattaattaatttatttatttgagaaagggtctcgctgtgtcgcccaggctggagtgcagtagcccagtctcagctcaccgcagtctcaacttcgccagctcaagcaatactccagcctcagcctcccgagtaactgggaccacgggtacatgccaccatgcccagctcattttttaaattttttgtagaaacagcgtcttgctatgttgccagggctggccttgaaccctgggctcaagcaatcctgcgtatcaaagcaccaggattacaggcatgagccagggtgcttggcctctggattcttgagggtggggaagcgcccatccttgtcacttggctcactagaatcctgcaaagtccctcccgtcacgcagcctcaccatgcctcttgtcatttttctgagccctgcgactgccctccttgccagtccttctggctgtgtccagagccttgctactcaatatgtggtccatggactctggcagcatcaacaccacctggcaccttgtcaggcagaacttccggccctctccccgcccctaggcctatggaatcagaatatgcatgtcaacaagatctccaggtgatgcttgtgcacttcagagtttgagaagcagggcctctgagttcccaactgggagacgccaccatctcctgaccctctacccgcgggtcactctcaggcattgcacacttgacatgccccagagggaggtcaactccttcccttccacctgctgcgcgattccaatagtggcacctcctacgtggtcacccaagccacagaccaagtagctgtcctccaccttccctttctctcatcctgcacatctgatctgggcattaccaaacccaatccatcccctaccaaaaaatgcctctcagaccctccactttctcttcaatgtcctctcggcttttctttccttcctctgaaccacctgccacctgcagcctgagggagcttcctgaatcacacacctgctcatcccacaccctctcagagtccccacacaggccatcttggccgcactgaccgttctagccccgcccccccacctcccagctcacgtcccatgcagccaagctgagtcactggcagttcccagaatatacatgttctgtgtcacctcctgaccttggcttttgctgctgcctctgtcacaaatattcttctcaatctcaggcccttcctggaccattccttcaaattccggaaacccaaccttgccctggagtctgggttagcggtccctctccagggccccacagttccctgtgctcccgtcatacatcatggcacttgttacactccactgtcaccaactgcaaatgtgtccatctcgccactacactgaagttcattgcatctggctccacttgggattctccccctgcacccaacacaggccctggcccaaggcaggcaccccgaagtgtttgttgaataaatgaatgagcaaatgggggaatgaacaaatgaatgaatgaatgaatgaagtgcttactccctctatccctttccctgacctccctcacaactccccgcctccagccccgcctccacccacctggcactgggtttggtacttcttggtgggccggcccacaatgaagatctgggaggcaggcaggcccagcacgctgtagacagagatgtccttcgtggagccataggccgcactgattttgatgaagcactgaaacacagggcaggcatagggggagagtgaggccagcccaccccctggaaagccttcccaggccaaccccagggggcccctgcttggggaccctttatgtgcactctggtagactccaagccatggggccaccctgtgtcaggaatgaaccctcagagtggctgcccctccctgcaccccaggcccaacccaggtctctgcccagtaaacagtcgtgaccacaccatttaccggccccgcctccaacagcagtacactcaggttaagtaataatgaaggcaagcgttcctttgtggataaggaaattgagttccaggtttctggctcacagggccaggactggaggccagttctgcctggctcctgatcctgtgctgtccacaccgctccacactgcagcttgccatgtgcccactgcctctcactggctggtgtgatgaccgcccccctccccaaccccagaatccccaattcaattcagagaactgcacaaggtccgtcttgctccaggggcacttccagaccatcacccttccctcccctccccaggataaacccgatcaaactacctcctcctgtgaggtgctcgccacccagctgcccctcactgtgtgcctcctgtcactgtcatcttctttttctcccactcacactcctctcaagccattggagactttggtcctgggtcacaagctttccttcctgccaagccccaccatcactgggatgacccacggtctgcatgacgtgaaggatctaccacctcccacccggcctggcagcttcgcaccttctttcacgtcagtggccgtcacttccaggaccaaactcagaacctgcccctctaactgtgaacttccacatgtccgctccgctcagggcttctgccccctccccaccacttctccgccagcccccacctggctgctctcagccttactgacacttgtcttttctgcaccagccctgctgcctcgccccttcctcatcctgcctgagtgacccatggcatccctgtgtccttgcctccaccccggattctctcaccccttcatcctcctcccacacctgcccggccaaatctcagccctggaaattttttccactatccaccttgtgtttttgtacatgctgcccaccgagagctgctaaagaaacagagccacgcagctctcaccttccatcttcttcctgtccttccctgagccctaccccatcctgcaggtgactgccttcgatgctggaccaaggagagggcttcctcagcccactgcccctcacctcaatggttggtttattcccaactggcctttggctcagaggatggagcagcccctcttcgtctggcccttccaccttctcattcacctgagctcactcctataacttggatcctccagctctggcgaccctgcctacctgcctcatgaccctcccagctgacacccactttctctgctcctctccctgctacttttgcccccttgtccttccgaactgtcttttcctcacaaggtcatctggtggccagtctttgtctactaggcagttctcagcatcccacaccctcggcaaaaggggcgctatctccttgaagccctctcctcccgatacctggagtctcgtctctctctcctggtcctcctccccctcactctcctcctggttcctcagctgctccttgtgctgctctcagtggcccagcacagcctcttctaacgcctcatctcccgtctcatggctccactgatccgtctcatgcatctgtttcccagtctccacctgcagcccagaactaccctaagccatatcaggtcccgtggctgtatcagccttgacatgtccacagctgagctcatctccctccagcctggtcctcctctcatgtcccctctcattcactcactcattcatttattcattctaccaacatttatggagtccctaccatgtggcatcatcacccccaatgcagaagctatattggtgagcagaacggacaggctctgcctccatggagaccttggtcaggtgtgtagcacctggatccctcctggtcacccagcacgggcatcttagaactcctcgctccctgcatccaaccatccctgagccccgactattccacctcctaatcctgtccatgtttttctctccatcccatacccatcatcgcctggattatggtcttcctgtcttttgcttgggcaacagccccctaactggcctccctgcctccagtttctcctgccaatctgttctccacacagccaccaatgggatctttctataagccaaattagacactgccacttccctgctttaaactcctccatggctccccgtgaccctcagcagagaatttatgatcttggcctggtttccaaggttttcaagatttgccaagtttgggcccctgatgacctctgagggctcagctcccacttgtcctgggtttaaccctgcctgcacttatcccaagcctggaacgtcccaagctctctcctgcctccgtgcctttgcacatgctgtttcactgtctacctgacaaattcatgcttcaagactcagctcaaaagttaccacctcctagcagccttccctgccctccctggacaaactgaagtcctttctcctctgtttgctaaaagggcctttttcaaccacacaccagtagttgtcaattgacatgtccttcctcctctagatcagggatttgcagactttttctttgaaaggccagatagtaaatatatcaggcttcgcactgtgtcaccactactcaattctgctgttgtattgcaaaagcaatcatagacaatacgtagacagatgagcttggctgtgttccaatcaaactttttttatttagagacattgaaattcatgtaatttgcatgtcatgaaatatcattcttttgattattctctccatccatttgaaagtgtaaaaaccattcttagctgaccagtcatatcaaaacaggctgtgggctgggtttggtcattatatgtcaacgcctcttctgctctaggtcagggattcttgattaatctttctgtgcatcagaatcccctggagggcttgtgaaaaggttcctgagcccctccccagagtttctgattgagtaggtctaagagggtggcaggaggaggcagggcagataatttgcacttctcccgagtttccgagtttcctggtgctgctagtgggaaccatagcttcggtcatggaaagcacatctgggtcacagaaagcacatccgggtcacggaaagcacatcctctgcccccctggttctgtttgtctctgtgcagccccaacaagcacagagtaaggaacacaatcggcacttaaatgtctattggatgaatggccagatgtagagacaagagtcaggagataaaggacgaaagtctgactcagatctagggcaagttgccggagcctcacctttctcctctgtcaacgacgagactaataacctacctcacagggctgctagagggcccatccagatccacgggaatgggatttacagactgcacatcacaaggccccacccgggaggagggagatggggagcggtggagaggagggctgcgctctcaagccatggagtccccaccccaggatggccactcacctcctgcatgaggttgcgcaggaagatggccttctgccgcagcgggtcatgcaccagcccatcggagaagaagatcatgccctgtgggaagttgtgctgggacagccacgacaccacccgctgcttctgcatgtccggccgtcccgtgatgtaaaggatcatgtagcccaagtcctgccagtgcctggtgagatggcattagaagggtccagccctgcccagtgcaggccacctgatgcccagaagcctgccctgcccgcagctgccctcctgagacgtcagagggacgagtctgaggcgtgctagggagaacaagggggaccccgaatcccctctctgggctgagccctggacatctcccctggatcaggcctgcagatgccacaggcccatatccaaactcatctcctcacccctgcccctctgctcacagccacttcagagtcagagacaggcgcctttcattcttccctgttccctgtgcctccctccctcctcctcctccaggaagaaagcctttcgctttcaccaggccagactctttaacccctcccccagccctctcacttaagccttgcttctcatccttagctcgggccccatctctctcctgggccactacaaaagcctcctgggcggcctctttccctccacccctactcctacccacatctaacctgagccctgtaaccctgggcagattactcaaccctccccaacctcccacggtttcagtttccccctctgtaaaatgggcataataatatgaactaccccacaaggttgtcctaaagacgaaaggagttaatcccaaacatgcatagcaaggtggtatgcttggtgtggctggctttattattatcctccgcagtgtttccatggtgattcctgtacatcgcaaatctaaccccagcactcctctgtctaacagcatctccagctccccagcgccctgaggtagagcctcaagtcctctctctgcctctgtggccatgtctctgctctgcctttgcatatgggatctctccagcccacccagagctgctttgctgccccctgaacaaacccttggctcttctgctgcacagcactcccctacacagcccctacggcaccatctcctgatattcccatcttccatctttcaagaccccccttcctccaggaagccttccctgcttcccaagcagaatcagcctctttcctctgtgctctcacagtgcagtgggatagctctggttggctgacttcacacagaatcctggctgcaagatgtcaggtaagcccagacctggttgggcacctttatggcacctgccaccagaaccagctaatagagatggggagttctaaaactggatgatgatctgagggatctggggatgctctacacaaactcaggggtgcagggatcacccctagggattctggttagttctgatgtggggcccagtgatgtgtttatgaaaaggggagtttctgatgactgtcgaggtttggggagcaccatgtggagcaccatggggagcaccctggagcccatggaaggcagtgggaggatcatggacccccagagaggaaggaccacagcctccccttccctgcagtgggagggggactgtgacgcaggagggatttgttgtaatggcaacaaatgacctagctctacaagggggaggctggccccctgaaatgggcttcagcctgtctaggcctgttcttacggagctgctgggcatcttgaggccagcagtctcccaggagcccaggagccaggcccgtcttctctccccaaaaccgtcactgttactggggtgaggcagggcagtctccagcccccaggaacttccagtgcctggcatctgtcctactctcgaggttctgatcacttggagtcctgggttacagtttctcatgcctgtgacttattttccccaccagactctgagtgtcctctgacttaagagctcgctctgcatcagtgcccagcacacagcccagccacagggggcctcagaaagcagcggatgcgtgcacgagtgcagggagggaggcagggagggaaggagggaggcagggagggaagaaggaaaaaaggaaggaattgagggagggaggaaggaagtgagggagggagggagagaggaagaaacagacaagctgaggtctagaaagcaggagaaattttcccaaggatactcaataaattactgttggaggtaaagccagggcttctcagctcgcagccccagagaccggtagaattcctacagcaaatcagaaaaacaacatatttcccccagggctgctggctcctgccccccagggagatatagccctcgtggaaggtggcactcaccggacaacatccactgcacccggccggaccttggggtcgcttcccatgatagacacgctggccgcgaaggacccatcaatgctgaacactacacactccatgcccctgggcaacaccgtgaggtagctcatggcacaggtctggtcgcccctgaaagaaacctgcctgtggtcagccgtgaggtcagggtcagacgttagccggaatccagaggtcagcctgtagctgcagtcagagctcagtctgggtcaaggtcagagagcacctgggtggcatctcctgatgccacggctggtgacctctcccatccacctctgtccatgcagacagagatgggggcccacaaagaaccccaaggaccccatcctctagacaggcctggctggaagggccatagaaatgagagaaaccaccctgagaatggcccctgggtcttacctgacgaccatcttcacaggatagacaccaacccccaggcgccggggccgcggcacattgtatgtgatgcgaccactgctgttggtgatctctgtgtccaggtgtacccagcggcctgaggatggctctgccattactaggatgtccacctgcggcagtgaagggggtcagggactccctgaaggctgaggggctacaggcttggcagaggggctgggcgggggaactctgggctgaggtccctgcctgacattccctggctcctgccagcctggctcctcatttgtccttggatactctgagcccatcctttcctccttgctcacccttcccggcccgcccaagcaggtgggtagctcctggccctgtgcttccaccccaggcagctcggccctcttgacaccctcaccccacacgctatgtggctccatgaggcacctggtgcaggtggagtggctgaggaggggaggcccagccccaggtaccttctctccagtcagagccaccatgtcgaggggcccgtacatgaaccgccccaccaggacctgggggccatcttcagcagcaatcacatcattggcccggtgattagccgtgacattctggaaggacagaaagaagctggctcagcccttgcaagggaggctcaaccttgctttatcattgcagtgttcctcagactggctggaggcatatcagcttgctgaatcatgtctctctactaacttctgctagagtttcagagatgtgttcccagggaacgtgtgagaaaaacagaccgtgagtcccccaaacgctgtcttcaaggtgcacagggcttcctgccattgtacgttttctgctttcgtgttttttgtttgattgattgtttgtttgttttgttttttgttttttgtttttgagaaggagttttgctcttgttgcccaggctggagtgcaatggcgcaatctcggctcaccgcaacctcccgggttcaagcaattctcctgcctcagcctcctgcgtagctgggattacaggcatgcgcctccacacctggctaatgtcatatttttagtagagatggggtttctccgtgttgatcaggctggtctcgaactcccgacctcaggtgatctgcctacctcggactcccaaagtgctgggattataggcatgagccaccgtgcctggcccgttctctgttttgactctgctcggccctgaggggacaactggcctcacagcctgtgcttatcttccagatccccgggctggaaactgcctggtcacttttggttctttcttctacatcacagctcacatccaacagtatttactatctgtctttttttttaagataaaatttcaaatgcacaagcatagagagagagaagagtgtaacaaagcctcgtgttcccagcacctgctccaccacttagcaacaaactcgtggccatcctggtttcgttcttcccttgcccaattccccagcctcggccccagccccaccgggattatcctggagcaatcctggacgctgcgtcattttatctgtgactgtctcaacctccctatttttcttcatttatcaatgaactggtttcagttcattctgcagcctgtgttggccctgaccagcccccactcccagcctggcctccaagaccccagtctctccatctagtgaccactcctttaccgcactggccacatcttcatctctcgcacagccacatcgcctggatgctgctaacagctccctaatggagctccttcctcaaaggcagtccctgcaacagatcctctgtctctataaagcacagctctactaacaccctcccgggctccccactgccctctgcgtagagtccggaacctgagcttagctttccaaggcttgcctgaacgacctcttcagtctgtctcctgctgctccccatccacaccttctggtcctttctgccaggctctgcagcagcctccaggcctttgctcacaccgctgtcccgccccccacactggctctaggtgccatccctggccctggccctcttcccccacattccagcccattcgctatgactagactcagcgccatcatcgccaagaaacactcctcggactcctcaaagacaggttctcaacctcctttcaattcccatgcattttaattcaatccaacaaatatctgcagacacctcatctgcatggggtccctgagataaactagtcgtgggccctgccctggagacactcagccaagtagggaacgcaggcccccttacaggtgcactgtcaggggagagggagcagctggttcatgaatataagcacctgaaaagatccggcatcccgagtcattagagaaatgcaatcaaaaccacaatgaaataccccgtcacacccaccgggatgactagaatcaaacagacagataataacaggggttgctgaagatgcggagaaatcagaatcctcatacattgcagtgggaatgtgaaatggtacagtcactgtggaaaacagtctggcagttccctatatgattaaccatagagttaacatttgatacagaaattgcacttctaggcatctacccgagagaaatgaaaacacaggagaaatgaaaaacacaaaaacttatacatggacgttcatagcagcattattcatagtagccgaaaggtgaaaacaccagcctggccaacatggcgaaactccatctctactaaaaatacaaaaaataaaataaaataaaataattagccgggcatggtggtgaacacctgtaatcccagctacttgggaggctgaggtagaagaatcacttgaaccagggaggggaggttacagtgagttgagattgcaccactgcactccagcctgggcgacagaacaagactccgtctcaaaacaaaaaaaaaaaaccaaaaaaaaaaaacaggtgaaaacaacccaaaaaatgtccatcaggtagtgaatggataagcaaaacgtagcatctccatacaacggaatattattcagcctcagaaaggaatttctgacacagcgaccagttggatgaaccttgaagacagtgcgctaagtgcaagaagccagacacaaatggtcacatattacatcatttcatcgaaatgaaatgtccagaataggcaaatctgcaggcacagaaagtcgattactgattgcctggggcaagtgagggagtgtcagctaaagggtacagagcttctttttggaggttatgaaaaagctctaaaactgaccatggtaatggttgcacacatctgtgaatatactaaaatccactgaattgtactatctaaatgggtaaattatagaatatgtggattttatctcaataaatatgtttaccaaaaaagagttggttcatgaaggattgatctccttctaccttttaggactgttcttggggtccatgtctggtcttttcaccagactggagatgcctaccatagcaatggttgtgtctgtacaaccctgtgctccactctctagcagaatgactgagacagagtaggcactgatgatcgtttgttgagtgaataaataaatctatgcacctcaaactcctattcatccttcaataccccacagaggagcctcttcagagaagccctgaatgatttgcccttacaatccttctttccatctttgtcttaatctgtaccttcctctatcaaatatcacaccaggccatactcaatggtaagtgactgagatccaggactctttctgattcaagtccacatctactgtagcctggcatatagcaattgctccataactggtatctcctcaccaaccctagtgtcttggactcctgccctcagggctcctgtggaaccaggccatgggaagcaactcacacacccttgcagctgcagtgcctgggctccatctgagtgtgagccccagcctgtttgggtgctgagctctgaggacaaattgaagcgcttacctcccatgtggatgccccagcccccgggccagccccacctcccggaggacacagtcccagccacatgcgaactgagcatgcacgcaccctcagcttgacctgagtccgcttacgaagccacttctcccgggggttggcaggactcagtgctgcagggtccaggcgggcgctttccttgatgttcacgctctcatagcgcattacctagccaagagccgagcagggccccggtcaggtcttctggcttctctgcttccctcccagggtgtcagtgcccaccagcttgtggccagctgggccctgcccctgcaaccccccaacctcacagcctggaaccgtcaggaggccgcagaccccgggacctgcattcctgtcctgatagctggggccagagcagtctcccagctggctcccttcctgagagaagtctctgccccgctgtgcccaaacctggcagccacctctatctgtccccactctctgccctccctctgttacaacaaggtggccctttcttaaggccggcttgagtcctgatcccagcccctccttgcttcttgaggacgttgctccagccatgctcccctcccaatcccgcagagctgattagactccctccgctagatcactctccttagcattcaaatacgtgtaatactgcccatcttaaaaaatactctctcagattcctcatgcctctccagtgaccgccacatccctgctgtccctcacagcagcactgacagaggacttagcccatatgctgtcaccccttcctcacctgccccctctcctccacccactccagtcagggttcttctccatcactcctctacggaagccattcttgccactgccccggtgactcccaccccgcctatctcaggggtcctctccctacactctctgggtcctccaacctcagggatgtcctcttctctccttcagtggcttctccttctctccctgggggagctccaggactcatccctgaacttccctctctgtaggagcacccttagtctggcactcatcgccagttgtaaatgccgtccaagctctgatgacacccacatttttatctggaatcctgatgtcttctctaagttccagactcctctactccccttccgtcccagcaactaagaggcagctcacacttcacacacccagacagtcgtggatgtgccacgtggggcacaggtttgggctggagcaccctggcctgggtgccaccgggctggggacccacccccagcccagcacactctctcccacccccaagaacctacaaacaaaactcactttcctccgccccctgcccagccctgctcttccgcacgtgcaggacacagaaccaccttagtcactcaagtgggaaacaggacgtactgggctcccgtctttctcctacaacgcagacagccacaagcgctctcaccgtaatgcaaatcttgccactctgtggcacctccaccccctgtcctactccaagcctcctctctaagttgggcccctgcactggcctcacaagaggcctcatggttcctctcctgccgtgaaaacagcagcctcagcctcagggtttccttcaaaaaacacaagccagttgctatttcttccttgctcacagccctgcaatggcttcccgttgaacccaatataaaaccatacccctgaccttggccatcacggctgttcatgaacatcatgacccctaccagctccccagactccctccccaccaggctctccttctggcgccggcctttctgctataccttctgttttgcagacgaggacattgagactcagtggggagtgggaactgactactccagtctccaagttgaaacactgggacactctcctgcgtagtttatatttaattttctagagtgtaccatgccgtcagccacccaggagccaatgtctttatgaagcccattctctggtcatgtcactccccactcacgtaggtgctccaatgccttcctcatgctcttaggatcaaggccaaaagctgaacagtgtctgcaagaatagcctcctctccagctggagaaggggcggtacccccttggggtggctgtgggcaggcccgcgactgcggcagcagtacctgtctcaggatgaaggccaccacgtctgtggactcccagtaactggcgtggaagaggtggggcagggccacggtggggaaggccgtgaggacatcagggcagtacagggcatagtcgatcctcttgcttccccaccacttggctgtgactgtgggtcggagaggaaggtgaggatgcgtggccggcccggggcctcacccgaggggcagcggggtctcccattgcacagactggtggtggatgccccacgtggggcacgggtttgggcgggagcaccctggcctggaggaggcctggggaacgcgctgctcttcctccttccttctcaaaacccaccagccctcccctaagatgtgcgtgccaagcccatgcccaggaaggagggccagacccacagagacgtccacagtctcacccagggccgccgctcagtggcagttcccagtgggctctgcctgaagttggcgctgagtctatgtctggaaggttcagcacttccttaatggtcagaggtcagagccctgtccagggtcaaaggtcagggctctgtttgaggtcaaagctcagaccctgtcagggatcaggggtcactgctctcctcaaggtcagagctctgatttgaggcagggtcagagttcagggctctgtccagggtcagaggtcaaggttcctccaaggtcagagctcagtttggggccagagtgaggatctggaccgatgccaggtctccatcagcagacgcccagctctctaaaggcagaagcaagcccccaggacttccttcaccttctccctatcccagggcctgccctcagcagctctagcagtggcccagcaaacacccagaggaaggttcccctcccccgaatccaggcagggccccaaaaggacctcactcactgcgggaggcacccacgggtgccatgctgtccgaggactccgagctctcgctgtgggagctcccctcgctcatcctccgtcctgggcgctggaacctcgaggcctgagggggcgaggcaggggcatccagaagtggcgggctgtcccgggagctgccctccaggaagagggggctgtgggtgtgtagggcatcagctggagggggaatttcaaggtcaggctgagtcacgtgtctccagcagagctgcccactcagtgccagccccatgctgggagggaggctgggcacttggaggagtcagccccggctctgctcacttgccagcccagcaggcacctgcccctctcactgtgcccaccccaccagtcccctgggcctgaagggaccccgctgccaccgcatattgccgcatttacctccttgcagctgtgagttatgcagacacaagctggagtcccagccatcacccctacctccaataaagctgcagagggagcctctgggacgttgccccaaaagcaccagctgaggtcccaggagtgactcatagccatatcctctcttatccaactcctcccctgcgccacaaagaattgaggctgcctctggaagggaatggggactccagcctgagagctaggatagcctcaggggagggaggggagtcccctgaccaaagagggatccatgggggagggaggtttccagcctagccgacctattgaagctccaggcaggcagggatttggaaataaaggctccattgaattaggggtgaggaagggatggtttttaatcctgaatcggccccatgcacaactcccccatccctgacgcaaacctctgagcaggcttaggctaaatttcctcaagtagggcgtggagccaaggctccgatttccaagctgctgactgtccattacaggtctcccatcgacgatacactcggtccatgcccggttcaccccacttgaccctggaggccactggctcttcgccaaaacacctgccctcgctcctgctgttctccctgcctggaagatctcaaccctcatcctctagctcttctccacctgcccaaatgcacctcccctctctggaccctaatcaaaggccacctcttccatgaagcccaccaggatggcacactctctgccctaccccttcagagtccaggctgggcactcataaaaaaaatagattggagcacggatccctggacccgccatcagctctgaaagctcaagtttacaccagccctggccacaggagtgtgtccgggagcctgttgggggcctctgagccccaagatgcctcagacaagcaggtgcttagcacaggtgggcgactctgaagacagaggagtcggctaaccttctgttctcacagcccctgctcaggtgagtcaccctactcactgagagcttggaggggttgaatgggctggggccccacctccagctcagcacactctctcccacccccaagaacctaccgaggaggagggactgcccatcgcccagtgggaacctctggtagcgaggcacgctgacaggcggcaccaggtggaacttgggctccagcagtggctcgagccgtgaggcagaggggtctgcgcaatggaagaagctgtagacctggctgcaggcaggacgcacctggaagcctggggtgagtgggaagacagagggaagccactttctagtacctgctccctgggccctaggaggctccctggaatgcagcctggagtagcctactcccctctcaagagcctccccgggctccctgctccccacgggaacaaagccattacgttcagtttgtctccccacccaggagcgcagtgacaggcacccagcactgcagccgtgctgcacagctgcccttccccaatcaggcttgcagctttcctttctctgagcctttgctcaaaacatcccttctccttgtgggccctccctcccccatttccacggggcaactcctttagattcttccagttttcactcagttaccacctgacctaggaagccaacccaggttccttcaggcaggtcagctgccccttccacaggcctcaaggctataaacactcagttcccaggcctgctgctagagttccaggtttgccagagctggtggaacacttctctcgctgaccagcaggtgtctccactgaggcatccacctcatcggcgggcctccctgtcctcctagaacagggactggaccgtccagcatccagggagccctagggttcattagcgacactgagggcagccatggggttctgcctcctcgcctccatttctaccacccactttatctgttccatactgtagcttgtcagtaagctttggccaaaagcatggatctgtggatacccaaggtgccctgcagcctcagacggtctgtacttctgtccttaagagtcacagataccctccccacccctcatgcctgctggtgccaatcgcctggtgtgtacattttagaggagcaggaaaaggcattcgaggttgcaggtattagccgggcacggtggttcacgcctgtaatcccagcaatttgggaggccaaggcgggtggatcacttgaggtcaggagttcgagaccagcctggccaacatggtgaaactccatctctaccaaaaatacaaaaattagctgggcgtcatggtgggtgcctgtacttcaagctactcgggaggctgaggcaggaaaattggtttaacccgggaggcagaggttgcagtgagctgagatcgcgccactgcactccagcctgggtgacagagtgagactccatctcaaaaaaaaaaaaaaaaaaaaaggttgcaggtattgcatgagcaaaggcacctgaggtgggcttggggatatgcgggggtgggtggtgagaccaacctggcagtcgtatctgcctcagtacaggagaaggagagggtgggaggcaagaggttgaatattctgtcttctcttccccatagggcgtgaccaccggacaatgaggccacaaagcagccaggggcacttgacatggagagtgaaatccatctgaagctgcctcaccttcgccctgtgtcaggagggaagctgctcctctctccctcctcttccccaccctctctcctctctttccacctatcccaactctgtgaccctccctgcccctgtccccgacttcactctcctcattctgaggccctgacacggtggccctagtgacgcacaggcacctcaggccccagcccacaccatccctaccgtccagcccaggcagcaccgtcctccgcatggccaggaccaggcccagtggcgagccgaagaggaagaagtcggacacatcgaagtcaaagcggcccaggctgacctcagggagctgcggccccccagccgccggggtctcagactcatcctttagcacgctggagtggatgctgcggagggaggaggacgcagggcagggcaggtcagggaaggaccgagaatgcgggagtgttcacacagcagcgcagcctgaattctgagcgtgaagtgcccaaccctccatctctggggcggggctgagagtccaccggctgcacaccacctacagtcagcactggccaccaaggcctggctgatatttggctagaaaaggaatcaacaaactttttctgcaaagggccagagagtcaatatttcagacgacatggaccgtgtggtctccattgcatctagttaactctgccattgcagcataaaagcgcccatggacagtgattaaatatgcatggctgggatccaatcaaatgttacttacaaaaacaggctgagcacctggggcgcctgagcatcctacacactggcaggcctgcctcgtcatgctggctttgtgttggccacactgaggattcctgcactgtgtaccagacaagcccagcctgcccaacactcagctggctaacgtcagttctgttctgctgggatcagggctttcatcgtaattcctgttccaggcaacccgcagacacagatgcaaacagcttggtctccccacccccagccccagcccacagatgaagcagagcttaaggagaaaaatgtgagacacacagaattccaaccatttccaacccaggtgcccactgtcccgggaagaatccaagttacgttcagccacagacccagagtaggacgctgagaatcagaaggaaacctgggcacctccctgaccttccagctagccattagctgcagcttagagtgaatcgattaactgaatgcaaagcaactaaactacttgagtcagaggagaacaaactttagaaagagctattgaaatcatgtggacaagtgccccaccctcaggagtgagcgagtctgcaaagttgaatcctcagtctccgcactccctcctgcctcttgcagtgtgagcatctcacagtgagatgatgactctgatgtttaacaatacatatttcatgtacagcgtggtccctaaacacatgccaactacttaattgccaaagaaaccaccatctgtccctacaccagaggggaaagctggctgtgtcagaccagctcctggaagcctccaacttctcatcactctccaaatttggggctctcctaaaggatttttcaaggatgagccaggactgttgagatttttcaccttgcaagcctcactagaaggtagctgcttttctaaaggatcatctgtcagcggggctttaaacattcagagatttaaatgtgcagagtctttgacctaataattcttcctccaggaatccatccaaatataatcaccctaatatatacattaacgtttatgcacaaagatgttcactgtagggctatttatactgctaaggaattggaaacagccaaaatgcctaattatagggattaagtaaactgatatccattcattcgacattatattgccattaagaatatttatcaagtatttttaattatatcaggaaaagatcacaatataaagggtttttttaaaataaaacgatcttaaaagcatgtagaaggaaacagtctctatgttaacaatgagactgttggctccctctgggtggtgagatgattatcttccaaatgttgtaatgacctcatgatacttatcacttgggtaaggaggaaggagaaaggaaggaagaagagagctgaggagcagaggaaaaagaaagagacattccttccaatttgggtccaagttcaattaacgtgtaagctgaattaatgtgcagataatgtgtttagcccacattgattaacatgtctcttctagaaagttaaagggcaaacagttctgtagaggagcctgcctggcccataaacaaaagtgtgttggattagatacatgaacttgggatagggagaccagaatgatgatcccagctcttccgtcactggctgcatgacctctagaaagttcctgacctacttgaccctctctttccctatgagaaatgataacaacacacacctcgggtgactcacaaaacacagtcacagcaattactccgccaggttcttaaaaccatgcagtgaagtaggctgggcagcattatctttttgcagaagaaaagccgaggctcagaaaaggacgactgttcccagtctctctgcaagtcagagcagggcagggacagggaaccaggttccagagtctcagtacagggctgccgacgagtggctgtggtccctcagtacagggccgatggcgagtggccttggtcccagcatttcagtgcttatctatgggcccccatggaagggcctgggacatctgactggtcacagccctcccagttggctctgagccaaggtcttcttgcttctggacagggaggggctaccttgagaggaaggcatggtgctgggtgatggcctcgcagtcataggtggaggagtcgctctgtttccgcggcaacggcctcttgggctcctcatcctccaacccactggagatgtcaatgttgcttttgctgagacgcttgctgctggccaggctgcaatcttcctccaccgcgactggggtgtcctttgggaccgaacaggggacaggagagaaaaagactgttgtcacgggagactctggggccttgtctcctccccccaagcacaaaccaaccccttcatcctaagatgtgaggggctacccttcttccaaaagacacaggaagccacattgcaatcatggtaggattttaggcacaggctctctcccgcatccaccgggattgacattcccactgggatgctggatggctgtcgaaggggccaaatccagctctccaggcctcagtttccacacctgtcataataatcccctgctactcttgtagaattatgatacacttcttcttcttcttcttcttttttttcctttttgaaacagagtctccctctgtcacacaggctggagtgcagtggtgcgatcttggctcactgcaaactccacctcctgggttcaagtgattctcgtgcctcagcctcccaagtagctgggattacaggcacccaccaccatgcccggctaatttttgtatttttagtagagatgggatttcaccatgttggccaggctagtctcaaactcctgacctcaggtgatctgcccacctcggcctcccaaagtgctgggattacaggcatgagccactgcgcccagctggattatgatacacttctttgtgacctggatgtcatggtgccaacgtgaagaaccagcactctctccccgaggggcaggccctgctcctatgggcatacccctcccgcggtcctgtcccccggctgtacctgggtgctgctgatgctccccttccggctgctgctggcagggctgtcccctgagggccccgcactgtagcagatggcatcgaaggccaggaggccccccacacagtccccgatgagacacacctggaagagatgcagctgggactgcaggcctgcccactgctgacccctcacccccacacccggccagagcagtgctgcctccccacaggagaatgagaaactcgtccttgggaggtgttgagagagcccaactgggaagcagtgtgcaaactggggagggtcagggttggcgttggcccaggccagcccaaggacggggagtaggctactctcaggggtcagacttgggctagagagcagcatgggctcagaatcagaactcagactgttggcctctgtttttctatctgtaaaatgagggctaactcagagatctcaaaagccacctttgggctcagaggctgattcgagaacagcctggccttggccctttcagtagattccagcctctctcccaggccggggccggaacaggggaggggagaggaggagagggcaggctgtcctacctgcccactgaagccaatcccatcagaggacttcaggaactctctgtagacctggttggctcgctcgatgacggtggcgacagcatcctggtactgcggggaggagatggccaacaggggaagggcggccagagggacgtggtcctggctgctgctgaggcagccctcatcgtggctgtaggggttcaggctgcagacagggggcccaaggtgagcccagccaggatcgggcaggttggcaggtttggggctgaggatcaggcagaagagagcacatactggccaggaattgggctccagggacccttcaggaagacccaggcaggagcctggtgacacagagcacaggcagtgtggggaggagaggggaagaggattcaagcctacactgactccctgtgtgtccttcccgtgctggccatgggtgtgggccctggggtccctgtgactgcagtctctattgccctcttctgcatggccccaaagggcaccccaatcatagaggaagaagtcagctgaggacccagctagtgtggaacatgtaggaacatatcatcatggcagacttcctggaggaggtggggcttgaactaggcctcaagaaaggctttggagaagctgggaaaggaggagagaggacatgccaggcttggggttcacatgttggccacagcttggagctgggcacatagctgcagacatgatgttgtgttcattgcatcactgggagaagatcagagctttcatcagctttgcagaaagttctgtgacccccgagggggctgaaagcctgccccacagtgtccagccagcagactgtccagactttgcattggcaccctcaactccctaccttcccactaggaaatcccctcctctctgggcagctcagactcacctgagaccagtgcctccaagtcacctacccctccctctgcccccatctctgcttctgttccctggggcttccgacccagatgcactgttggacctggctggtcaggaaggaccatacagggaggctgggaactctccacccctgcccagagcctgcccttcccccttagctcaagctcaggctgatggagcccagtgcacatcccactgggactcgacagaatctggggcaggtgacagggctggagcactctcagcaggtggcagagtcctcgtggtgtacaaggctggccctgtcagccattcctcatctccaaagaacacaaattagaggaagcaggcctcgattgcagccggagagattttaattagctgagaaagagctccctcccagccgtgattatggggtgatgaatggccctggcaaggagctgcctgggggagaactaagctccctcccgctggccccatgaatgaatggccaggccatccgtcttcctggagataggggtgacccagctctggaggtcagatgtcctggggacaggtagaggggttcctgagacggatgatgaactagcacagtgaagtcctggactatcagagtgacaagggaacatgctgcgccaccagttcagcagtgagcaggtgtcaaagatgcagattccggggcacctccctcctgaatcagccactgctggagggaggcctggacatctcgcagtttaacaagaatcacaccagggatttgggcaattagccaggttgcggaattacagacctaatcttccttccttccaactctgattgagatctgcctgcaattcctgttggtgtccaaggaacgcagataaatcagagtctctgactttcccccaatctagagggggaaaaggaaggcccagggaagggaaggggcttgcccgtgctctctcctgactggctggaagctccagggcaggggactttggccctccccgcactgagccctcctcagagccacaattggctgagaacatcggctcccattctcctggggaattcggagtgcggtgcgccccacacacctggcaccctgctggggacctcttcccacccttcccagctccggagccccggggtatgagggctctgcctgagggctgggctctgcagcagccccaagtctctggcgaggtcctgtgagggggacaggcagaacagaggtgcagaggcctccctcctgcccctgactgaaagttccaaagcttccagctgccagccccagtgatctgccgaatgcctataggatttgggccctgtaggcgtttgggtcatttttgcacatatgactgctgagaacccaggtatccacccggccccaggcacctacctttagctagttcaacaggataggcaggaggggagcactgcagccctcagtgcctggagcagtgggtggagctcccagaggccccataccctggaggtcccctcagtttgtcccccacaggtgccagggcccacagtgggcaaggatgtgccagcgtcagcagtgagcaagctgcccagcgctcaaccagcccttctgtggacacatccttccctcctttctccccaccagctgggttccctgctgcgagttggaagtctctctccccagcccactctccacctgcagagagagcccctcttccagccaggaggaagatgatgtgagtcatggccagcatccccgaagctggcatccccacagttagtatccccaaggctggcatccccatggctagtatctccaagactagtatccccaaggctggcatccctatggctagtatctccaaggttggcatccccatagctagtatccctgaggctagtatccccatggctagatccccacagctggcatccccaaggctggcatccccaaggtcagcatccccaaggctggcattcccaaggctggcatccctatgtgctttctacattctggacactgtgttgagtgcttcacacacattagcacacagactcttcacagccaccctgagaggttatttactatggctaccttcattgtacagattaggaaattgagacaaggagaagttaaacaccttccccagaccacacagccaggactcaaatccaggcggcctgagagcccacacacttagccgtggtatgcaaacccaaaagtcactcctccaggaagtcctctctggcctttctcagagagcccacagtgccctgtgctctgtgatattatgctccatcagagcactgtgatattatgaggtagatagatcagatgatagatagatagatagatagatagatagatagatagatagataatggatggacagatggatggatggatggacggatggatggatgaatagatagataaacagaatagaatgatagagagagagagagagagagagagagagagagagagagagagagagaatacatagataggttttgtccacagttcctggctcccatagccgttgttataatgttggggcacttagccctaggaaaacagaacctctctctctctctctctctctctctctctctctctctctctctctctctgtctgtctctctctctctctctctctctctgtctctctctctctctctctctgacattctcctgccctccttgagctggctgtgaagaaattctctgatctccgttgtctgatttaggtcatgagaccctcatttcagaaggagtcctgccccatacccaggaggaaggaatgctgcagaggccaagaagaatctgagcagacaggccctgttgggtttcccgacttggtctgagtgtcagcccctttctgtccaaccacatatctatgttgtcaatcatgcctagccaatgacacctccattaaagggccaaaaggacaggagagcttccggagagctgaacgcgtggaggttcctagtggctggcacacctagggaagctccgtgccccttcccccatacctcaccttatgcatctcttcatctgtaacctttataataaaccagtaaatgtgattcagcattttcctgagttctgtgagccgatctagcaattaattgaacccagtgacagggttgtgagaaccccagcttgaagctgggctgtcagcagcacagataaaacaaactggggcatggtatcggtgtcagaagtttggggcagtcttgtgggaccaagctctcaccccgtgggatctgatgctatctccaggtagacagaggcagaattgaattggagggcacccagctggtgtccacagcagaactgattgcttggtgtgtatggaaacagcccctcacatgtggcccggaagtcttctgtgttgactgttatggtgtgagagcaaaggaaaaacaccattcgtgtttttcagattcctacttggctgcaatcgtgtggccgagtttgactcctgtctccatgggctgggcgaccctgggggaaactagctaaactctcaacactccgtgtctttttttttttttgagacagagtctcactctgtctcccaggctggagtgcagtggtgcaatctcggtttactgcaagctccgcctcctgggttcatgccattctcctgcctcagcctcccaagaagctgggactgcaggcgcccgccacctcacctggctaattttttatatttgtagtagagacagggtttcaccatattagccaggatggtcttgatcttctgacctcatgatccgcccacctcagcctcccaaagtgctgggattacaggcgtgagccaccgcacccggccaacactcagtgtctttatctgggccaaacagatcaggcttgttgaacactggaagtggatcaagatttcatggggaccccagcacacccaggcccaggcagaggactcttcccacaccttccaccagggatgcttgtgtttcgtcacgatctgacaccccagagagtccttgcaggtacccacctgcccacggggtccatgctgcagggggagcccctccacttagttcccccaccaaccccaaccagttcaaacaagcagaaatggactcactgagagacaagcgagaaagcctcagagcagatggcaggacaggggacgaacttgatgaggatgtggcccagggcagcagggaaatgggctcgtgtgaccttctccagcacggagctgaaggtgtggatgtcggctgccttgcaggacgggtccccggcacccgtgtccaggatgtttcccccatgcaggaccagcaggaggacatgtgtcttgcaggagcgctgcgggcagccttcctgagagccaaggcggttggaatacagagagagaggcggctggggtcgggggaggcacacagggacacacacacacatgtgcgcatacacacacactcacacacacgcacacacggggagactgaggccagagaagcaggcactatgtccagcctgtctcagctgcaatctgaggagcagtctcagctctaatacaccctgctgtgtgatagaacctctggtgcattcagagtgagggaaggacatgggctgccaggagggatgtcagggcaggaagagtcccaagagatgcttcctgttcatatgggaacccaaagcccagagaaggacacagacccacccagggtcacacagcaagtcagacgaagagctggaagaaaacgaggccgcctatgatccgagggctcttgctaaaatcctggcctctgagttgagcccagacaccctccgaagcccagcctacctcgctgtcttcgtggatctcgatgcttccctgggctgggaacctctgtcttctcaaggaaacccggtacagttctcctgcagagggaaagaggggagctcagcatctccaggcttccctacagtgaccagacactccctgggcccagctggccctaaaggtgagaccttggcttacatcacaggtgagctcaagttagagtctggagctagggagagtcaccccatccaggccctgcctctgaaaccaacacaacatgaaaccctttctcctcataaggaaaagggagggtggcagagtgaggccatcgcggatggtgctcctgaaaggaggggcttcctcgaaaggaactagcctgcgtttcttcaccaggacagcagcaagggtgagtaccacctgaggacttccacttccagttatggacagcgatttgagcaaagcctcccgctgagaacaactagaagagctggtgtgatggcaaagcgtacgcacccactcttgactgggctgagaggtgcccagagagctggtaaaacatgttctctgggtctacctgtgaggtgttttgggaagaggttggcatttgaagcagtgaatgaggcgatctgccctcaccaaggcaggtgggcaccgtgcagtccgtgagggtctgagcagaacaaagtgctgcagggagggaggattcactcttctcaagctcagacttccatctcctgcctcacacatcagcactcccgcttctccggccttaggacttgaactgggattcgtgccattttctcccccggttctctggcctttgggcttgggctggaactacaccacaggctttcctgggcctcccgacttccagacagcaggtcagggaacctctcagcctccatcatcacgaaaccatgcacgaaagccagtccctcataataagtctctttttaattttcttttcttttttttttttttttgatggagtttcactcttgttgcccaggctggagtgcaatggtgcaatctcggctcactgcaacctccgcttcccgggttcaagtgattctcctgcctcagcctcccgagtagctgggattacaggtgtgtgccaccacacctggctaattttgtattttttgtagagacggggtttctccatgttgctcaggctggtctcaaactcctgacctcaagtgatccgcccacctcggcctcccaaagtgctgggattacaggagtgagccaccatgcctggccaataagtctctttttatacatctgtgtatatatcctttcggtcggtttctccgcagaaccctaatatggctggatacatacttaaaaaaaaaatatctgtttgaagttaacagagaaataatagaggcttgaattacgggaccactttccagggaaggtagactcccagagagttaaggtcggcatttgaaacattactggcattgcccatgagctttagggtaaagctggcctttgccagaaatctctccttgctcctctcagcagcctgggctcaacgcctcctccttcaagaagtccttcttggctcccagccctccctgagctctcatttacctaacacagaattcagtaaaccacagccatggaccaaatctgccccactgcctgtttttgtaaataaagttttattggaacacactcaggctccttcatttacatattgtctatggcaggcggcttttgtgctacagcagcagagcagttgcagcagacaccttacagctcacaaagctgaaaatatttattatctggccctttccagaaatgtctgtcaacccctgatctaacacctacactcctgaatgtgatgacactggactcctgggtggagagacttcaaaggcatccaacagccacccctgagcccccacccaaatgatacctgcactctgaggcctccttcctgccaccaggctgccttcagctcctctccttcctcccccatgagatggatgctacctcccgtgtgtggctaaaacctacagccaagctgaaccacctgtttgtcttcagggaggaggaactggctcatctcttaaagtcgtaggttctagatgaagatggtccttgccttcttcacaccccacccccaccagagcctgctgctcccctctaggagtcacatctggggagggtccttccaggggctttgcgggcaaccctaggcaccctgtcaacatcccctcaccatgaccagccccaggggagggtacctctacaaagaactgcaaatgagaagcttttctcagcagggaagagcatttctgaaatattctgtcctcacagacacaatcccagtcaaagggtaactgctttatgagctccgagctactgcccacacagacaggaaatcatttcctaaatgatggaggaagagggaaaactcgtcctggggcccggctgtgcccagcacttcctagttcttcccattggctaggctctcctgcctaatttctaacttactaaagaccttgccttgggcttggctagaggagaccctggctctctcttcaggacaggatgataacacaagacaacagtaacagctcagctttgttaagcacttattatgtcctgggcactatgtgctttacatgattcatcctctctagtccccacaattactctctgagtctgaatgatcttgttattagccccattttacagatgagcaaaccaaggctcaatcaacctatgtcacttgccccacgtaccttaaaggttaaagcccaggtctgccgctgccaggcccctttccaccacgtgaactagtaccaggagggagagggtctgagtgtggcttccctgagacaaagcgctcatgcttcatggtgtgtgcggctgtgtgtgcggctctggggcaggctgtgagtcaagaagaaccaggagtgatggcagggctgaggttggctctagggctgggaggagcgtggttaaagccacggaccctggatccagaacgcctgagttcacatcttggctcttatcagctgtgtgacctgtgtctcagtttcttcatctggaatatggggataataaaagcagctaccccatggggtggtggtgaggatagatgagttcatatgcataaagggcttagagcagggtgtggaacacaggaagtgtcacatgggttagcggctattgttattattatcattatccaggggacatccagggcacagagccaggaccacagctgacaagatgggctgatggggacattgccgcctccacacttgcctgccctggtgccaagtccctccctgagccctggcatgctcctcggccttgctgggctgggcgcctgtttgcagtgtgattacaggattaaatgctgtgattgccacaaattactatggcaaggctataaatacattgcagggaagacatgagggtcctgttgtctcctgggcacgatgccctctgttaggtgggggctggactctgcgccctcacccattacaaaggccaaggagcacctccatctttgatctgtctggagccagctccctcgcgacccatgtgatgctctgggcatcaaatcggtggatgactgctgcatcctggccaccaacgatgttgaggccgtgcctggttccgtggggatgggagcctcaggccagagactgggcaggattgtcctcagtatccctcactcctccctagcaggaggaaagagtctcacctcctacgctgtttggggacagagccttgcttcctttccatgcacaaaagccaggaatgctttgctctgggagatggaggaagggagatctagcctgccagattcagattctggccccttgagagttgactaacaggaccagagcttccccacagaaaggcacacctcccgtcttcatcttagcagaggcccctgtagacaagcaggggcagccgtaggctaccttccctgtaccttccccacaggtctctgctcttctaaaagccagacattcctaccatgataattggggccattggctctgactcacccacaagacataactctttcactcgtccttgcctttgctcatgctgagccctctgcctgcaagcccttcctccctttgcagactggcaaactcctacttgtcctgcaaaaccctgctcaatggctatcacctctagaaagccgtctttgatctatctaggcaaagatggctatcccatagtatgcggcactggtcctggcttactcgtctatttccccatcagactgtgggccccttgagaatagagtttaccagttttcagggactaggatggcacttttgtgaaaaccttttggaagatcccaggatgcacacatcctgtgagacatctctgtgccattaaacccccaggagaaatcaggttcagggaagcatcatccactgagaagcacgttgcttcaaagtactcacaggaactggtacctgggaacctctggggattctagaagagtctggcctgggcttcataattccacccctagaggcttcctcagggactctggtgacaagagcagctggcagggggtcctaaggggtggagagccacataaaggggaccccaggacctcatcattaggctgcctgtttcttcccacttcctgttaatttctgtttgcatgtccctattcaggctgggtccctgcagtgcccagatttggggtgggggagcccacagctgtttttgtgacagtgttttttgacaggctttgagacaggccagctaccgcagtgccagctcccagtgccccactagctccacatcaggagaggtggtccacccagctcaccatggctgctcttgatgcctgaagaatggagcctatgtttgcttaatcacagccttggagaggtacaaatcgtgatcatcccctctaattaccaatgcgccacactgctcttgagacgaaagccaaggtcatcacccacacactcagcaccccaagcaaagcatcaccccagctcggctggagagcatagctgtctccctctctcttgctaccaacctctggggtccacaggggtggatgctgagggcccactggctaaagccaaacactcagtctcctcctccatccttggcagtcactcccaccccccgttagtcacccctggcatcaaccaagcagagctgggcccagcttgagaccatgtggcacatcctgagaagtagctacaaaagtatctaatcctctgtaagctagtggaagctcatacatgggtggaaacataaggtttttttttattttttttttgcctaaaccggcccaggtcaccaggccagggctcttcatcatcctgaaggaggggagtaagaaagggatggtctctttgttcttactaatgcctccacccctcagccctgcctcctcagagagactcttggcagggaggaaaaagtgaggagaggctactatgaggagcaggaacttcttagactgttaggccctttcagtcaagctcattccccatttaaaaagacgttacttgccggggaccgtggctcacgcctgtagtcccagcactttgggggaccaaggcaggcagatcacgaggtcaggagttcgagaccagcctggccaacatggtgaaaccccatctctactaaaaatacaaaaattagctgggcatggtggtgcgcacctgtaatcccagctactcgggaggctgaggcagaagaatcgcttgaacccggcaggcagaggttgcagtgagccgagatcacaccactgcactccagcctggcgacagacagagcgagactccatctcaaaaaaaaaaataaaaagacatgttatgctctgaggatcccctgtcaagtccaccctggccctgcctggaagtcaaaggctttgctattttgctgtgatgtgggattcatccatatacctagatgacatctgggaagaactacagcctcattcagtagcacctgggggactcaatccacagcccccattccccaggtgagcccgcatgacacacacatgcagaaagaaggggacacacacagacttacaggggagacaggccctggatagagtcctcggatgggaaactaaccctctactcagagggtgacctcagacacgctctgcaaaccaccgcaaaaggaggggtttgcctacattccccggtaagagtcaggcagtctgagattctatgagtccaagcataagtgccctctgtgagtgctagcctccagacccagcagaatttggcactaggaccttgaaggggacccagagtcacaatgatggagtcactctgagaggctatggagaaaggaagagcaaccaaaaagctgcaggcggcaaatttcactttgcttttcaaagtggttgattccagctaggggcttggcgttgattcctaggcaagtcctggggcaaattaataaacaaacgctttgaggacccttagaaaaggaagcagtggggccgggcgcagtggctcatgcctataatcccagtactttgggaggctgaggtgggcagatcagttgagctcaggagttcgagaccagcccggccaacctggtgaaaccctgtctactaaaaatacaaaaattagacaggcgtggtggtgggcacgtatttagctgtaatcctagctacctgggagactgaggcaggagaatcacttaaacctgggaggcgggggttgcagtgagccgagatggccccactgcactccagcctaggagacagagcaagactctgtcaccaaaaaaaaaaaagaaagaaagggaaggggaggggaggggagggaaggggaggaaaggggaggggaggagaggaaaggggaggggaggagaggaaaggggagggggaggggaggaaaggggaggggaagggaagggaggggaggggaggggaggcgaggggaggggaggggagcagtggctcccagagctctgataggtactcttggaaccagctcgctaaccctgcatcatagcatgtggcatagatagggtcgctggaccagcagctcaagggaatgccaagggcttaggggcatctggggaggggaacacactggcagaataagaaactatctaaggaacccatagctctcaccacttgagctcaaggaatgtgggctcatgaatgggaacctgcggccacacaagatgtggggaccaacagccagtagcagatgcggatggaacagcgtgaagctgttctgaaggttttaaaacttttttaaaaacaggggaaatttttagccaatgaaagttcccttaggagcccaatttgcaaagatgaaagtggatcggctctggctgaagcaggctggggggcccagagcccaccttcctcactccagcacatccctgtccctaggcagctcctgagggcttcaagagactgaaacttaaaagccactgagcttgttcagcagccagactgcaggccaccctcctctgcaggttcccagctcctagcattgcagaaaaggaaaaatgacaatctaaataatggtgggggaggtgggggaagaagcttggggcctcatattagaaggaaacacactaaaatgtttacagtggttttctctagatgctgggacaatggaatatatatatatatatatataataaagaattaattaagaattaagatcctgtgtttgggttaaaaatgaactagaggggctaggcgccatggctcacaactgtaatatatatatatatatattttactttctactttcatctattttccaatttttctctaaggagtccatatttcttttagtttaaaactatttatgaatgtttattggatagataatacaagtatgtgtcatgtttatgcaaggaactttttttttttttttttgagacagagtctcactctgtcaccaggctggagtgcagtggcgcaatctgggctcactgcaacctccacctcccgggttccagcaattctcttgcctcagcctcctcagtagctgggactacaggcgcccccccaccatgcccagctaatttttgtatttttagtaaagacggggcttcaccatgttggccaggatggtctcgatctcttgaccttgtgatctgcccacctcagcctcccaaagtgctgggtttacagacatgagccactgtgcccagcctatgcaagaacattttaaaaccagccacaacctcctattttagtcaatacaaacactacaaagaaaaaagtgtgaaatgttgtcctcccctcaggagctgacaggctaatgagggagtataaaaggataagaaatgcttgtggaaggaaagaataaatgtggaacatgatgagtgaattaagatcctgtgtttgggttaaaaatgaactcgaggctaggcgccatggctcacacctataatcccagcactttgggaggccaaggtgggtggatcagttgaggtcaggagttcaagaccagcctggccaacatggtgaaaccccgtctctactaaaaatacaaaaattagttgggcatggtggcgggtgcctgtaatcccagctacttgggaggctgaggcaggaggattgcttgaactcggcaggtggaggttgcagtgaacagagatcctgctgttgcactccatcctgggcaataagagtgaaaccctatctcaaaaaataaaataataaaataaaataaaaataaagtaagccttccaaggacttaaaaaaaaaaaacaatgaactcaataccacttgcctattcccaccctattggttattgcccaaacttgtgtcaaggctgaaaacaccaagaccaatcagacacagcatctgccttcaaagatctctcaagcccctgggatcacatgaccaagagtaggtcatgtgaccaaggtcgggtcaatgacaaagacctaggtcatgtgcccaagatcagtcacatgaccaaaggctacaaacagcttgagtcagggtagtggggctgccacagttacttctcaacctctaaggctgcacaaaccagagatctcagttcaaaatgagagggagacatccctgccctgcccctgcagctcaggccctgctgagggtatgtctgatgcccaataacagagcaggaaagctatagaaaggggctcaggaggttgagagacccagcctggagaagagcagcagctgcctgcaaatctatgctgagcctcgtgtgggtcaagggagcagagggcaaagccaggacaaataagggttggggtggtttctggagagccattccaagttttagcacaacctaggaaatgtttacaacagttcaagagtgacctgtgctgacctgcaagcaggctgttctccttcactgaggttagacaagcaagttatataagtgaccacgtagcagggtgctggggagggaagtttcatccagagtctgggggagctggtggctgaggtccctccatgactccttaacgctttcagggtcagaatctaatcacgtccacctggattcatctgactaaccaggctaaggtgatgtgttcaaaccttcaacggcccagtgagcctttcacagagacactaccccagaccagggcctggcccttgcgagggcctatgccctaaaccctgccccttgagaacatgttgttagataccccaagtgaacacggggttagttcggaggaacagttctcatgggggatcccagttcagatcagaggtgccatcctgaatcgggcccagtgaaatttccaggtatacaaccatgagaaaactctgccaccacgacacagggatgctagagggacatgaaatcccaaaccctggtgttcccctacagactcctttgcaacaaacacagccctaagactggtcctgagtttctagtcctcatccggtgtctcaggcaatcttcacattcatcctgtgaggtcaggagtactctccccatcttaaagatgagaaaaccaaggattggaaaggtaaagtgatttctctcaagatgtaagtggagggctgggtacttgaacccaggtcaccaggtcagggctcttcatcgtcctgaaggaggggagtaagaaaggaatggtctctttgctcttactaatcccttcacgccacagccctgcctcctcagggagactcttggcagggaagaaagagtgggaagaggctactcatagcaggaacttcttaggctgttagcctgaccccctaatgatcccctgtcaagtccaccctggccctgcctggaacagcacatacacaaaggaatgcagtggcacactccagcccatgcgcacctgcacagtaacccctgccaagtgtgtgcggcatccagcacagggcctaggaatggctctcacacataggaaaaaggtgctcaaccttagaaccctaaactagaggaaggctcattgaaattaccctaagacaacttttttttttccacctgtcagactggcagttgtgacacactatgggccagggtgtggaaaaacgatctcttcattcattgctggtgagagtaaacatcagtatagcctctgtgaagggccatttggcaatgtcattcaacatgcaaaatgcctttgacccagcaattccaagcccatgtgcaaaaggacatatgtacagtgctaaccattgccacattgcttttacaacagcaaaagacaggaagcacctatatgtccaccagtaggggacagattaaataaattggaccacagtgaaattgcacatgcccattgcaaaaaacaactcacctctaagcatactgagctaaggagacaatcatgatctagtatcaacatctgagaaaagcaaggtgcacaaagaaaggaactgtgtgctcccatctgtgtgagggtatagatataaaaatatatataaatgcatatttatggatagactcttgtatgcagagattatctctgaaatggaatctaagaagccagttataatcttttcttctagggagaattgtgtgcgctggaagacaggagagggaggcattttataccatgtatatgtgctacctactcaaaagacagattaaaaataagaatttttctaagtgcatgtagcagggtggtttttttttagataccaatttatatcttctcccagctctggctcctttgcctctgggaaggtttgtggcagagcttcctggcttttgtttccaaaagctcttttgttcccaagaggaaaggatttggagacagagaatgcttcagggtgaaaagagatcctcacaccctggccctgggtggaggagagagtcttctatacgggtcccttcgcaactccaggaagatggagaacaacataagaagacctggccatcccatgctccagagagcgtgaacccttgcagccaggagctgcaagcccaggacaaaagggaccaccaggctgggttctggggtcctcgtgctcaccgctgtggacgaaggaccccttgcacatgtgtgcatgctgcaggcacccttcccccaccagagtgctgggaagacccctggagttttgaggcgatggcaggagagggaggaaagagaagctcctggacacacagaggaggaggagtccttcaccagcacagctgcaagggaatgtacagtcaaaatcaaagtggcttacagaaaaacaaaggaaagggcgattcttccacgtggaagtaagtagactgtgcagtgaggtctctctttgcccctccagagcctcagtgccccatctctgcccgactcagcccgaggccgaggccccctagctacaggttgggtgtagcgatggaaagcaccagtaggagaactggggcaagggagccccctccatgccgggtcatcgtaaggtggtctctgctgaaggctcatgcaggagcctctctgggctcttctccttcaggggtgggaacaaccccagggtattgctgatgccttcttggtttccttaaagcctcactcacctgtgaataaagtctctctgctaagccctcctcccacctgtggtttgtgtgagccttccgtttcctgctagaaccctgactgcatcacgggctggatcctaagtgctctatgcaaatcccatcacctcctcccacaccacccctctccaggcttctcttatcctgaccaagcccccgccttctgctccgctctcccacactcgcccctccctctctgaactcagccagttttcgcacatcccctttccctctcactgcagagtcccagcaaatgttccccgggcctgggctcttctctccactgccccgtgaccagataattcccacaggaacctcagtgttccttccttccgggggccttccactcttcctgtcctctccacaaaagcgccacggtcctctctttcctggggttaatcctcacgcttttcattttatgactatttgattattatcttcccctcctccgtctcccagatgacaagatccttaagggctgggactgggtttgattttgctctattttatccccaaagactatcatgatgttggcatataaaggtgctcattaaatattttttaaacagatgggtgaatgaactaatcatttgttcccattttgcacccctataagtgtcggaagctgcacgtgccccagcaaagcccagatgctatgtagatagacttgtatatgcgcacagagacgcacactcatcctcatgaaagtgaatgcaccaatgcattggcatagaggctaatgcacatcctcatgaaagtgaatgcaccaatgcgttggcatagaggctaatgcacacatacaagtgcaagggcacacacacacaaacgagaaggaacgatgccaagcagagacacacacacacatgcaagaaaagtgctcccaaggcggacgtctgccaccctgagctcattaaagctggctaaatatagcctgtctgcagctgtgctcagcaagctgcccacacaggccaggaaaagacaccagttaccaggcagaggagtggagaggccagccgtgggcaaggggcttcacgcatcctgtctgtggtggggggtcttcctggggaggccaggggctgagggtatgtgggaagggaagcccttcggtggctggtcagggcattcagagctgttcctctggtcactgaccctaggcagtggggtgcgaagtcaaaccacatgcccacgatggggagaggtgagctgagccatctacatctctctgcatctgagccgaggacccaagctcagtccaggaccaggggctggagttaggacccagctggggataaattggggctcagttggtggctaggagagaggctcagtagaggatgaagataaagggtcagactgggactagggttgggactctgtggaccattgccaggtctttttctggggacaagaggaagttcacagccccacagagcatctgctctaatgtgtggacgtggctgtgggaagaccctccccgcacgtgggacagctgcctgcggccctcacccctgcagctgatgccaggcgctggctctggaaaagccatgagacgaccagcatggctttgggtcacatgtgtcaggtggctgttgtcatccacacaggcagggtccaacttcaagggccacaatagacaggtcttcctgctgtagaatctgccccccaacccatcctgcatgggggtggggcagagggaggctcctctcaactcgcactttcccagcctgtgcactgcggagccctgcccctcgtggagctgctgagactggaagggagaggcatggagcgggtgaggcagccgcaggtctcctgggagaatgtcatgcctcctcccaccggacgttcctggatgggggcgtgggcagaggaaggggagttactgcccctttgagacaacagctctaccctttgcctcttctatggtggtggcatattgcagcaggaggggtgagccgggcttgctggattcagcacgtgtgagcccagcagccatgaatggagccacaagggcagaggccaacagtgcggggtccagagggaccctggtccttcccaccatttgctgcagaggaactgcttctgtctcctccgcagagatggatggtatgctcaggcttcccaattagcccacaagaaaactgtgcttagagagtccacgctcctcccagagctagcctggggaaacgggagagctgacaggaagaggggaaagtggtcgggtaaggttgtatggaggcaaggttcacgcttcattcgagaggatccatgggagagaaagcaggggctgtgagaaccagcctttcctcctccaaaggtctctctgacacgctgaagggaggatcagagtgggtgagatgggaagcaggaaggcagggaggccgggaggcagggaggcagggacgccagtgcacaggaggatgcaatggtccaggagagagaagatagggcctcaactagagaagggatggggacagggaggagtgggtgggtctcatagcactgctggaggttgaatgacactagcagaggctgatttgatagtggatggtgacagagacagagaagtctagaaggtttctggcttggattcatggaggatggtgccattcacactggatggaagcacagaaagagtgaggttcaatggaaacatacaagatccctgagtccctacagccagcaccatggcaggtatagtgggagcactccggaaatggtcactgtgctaactaacggagcagcatgaacaaggcagaaacagaaagaggcacagacagaggaagccaggggacagagaggtggcaacagaagaccccgagaatgtcagaaccaggagggactccatgaacagacagatggggccccaggcacgagctgagactgcacagcaactcggcagtaggtcacccaggtctcctcccccaagtccaaggccctctctcttctctggacccccaccaagcccccacacacaatggttcccttggcttcctctagtttggtttcaaatatcaggctcacgccagtgacagcaggctgccaggctgccaggccgcctgcccaactgcacaatgaaggctggggctgcctggcagccacaaaggagaaagtctccaagacacccctccccgcatagccactgcagacaagcccttgcaacctcatacctgcgcatgcctgagaggcccatggagacctccctccccacacttgcaacccaagaggccctgtgctgtctggctggctcatgtcctcctctctggggactccaactcttggggaaacactgctgtgacaatggcaactgaggcagccgcaggaccagtagagcgccagaaagactgagccccacttgataagattcatcatcacatggggaccaggtgttccagcttccaaggcacatccgtccagtaacaagtgacaaccatcagaactttctatccagcctgtgcggatcctagtatctcacagatatcatctctggtgccctcagcaactctaagaagtagatgatatggccatcttttcttttatttatttatttatttatttatttatattttattttatttctgaggcagagtctcactctgttgccaggctggagtgcagtggcacaatctcggctcactgcaacttccacctcctgggttcaagcgattttcctgcctcagcctcccaagtagctgggattacaggcgcatgccaccatgcccagctaattttttgtattttagtagagatgcggcttcaccgtgttccccaggctggtctcgaactcctgagctcaggcaatctgcctgcctcggtctgccaaagtgctgggactacaggcatgagccaccgcacctggcacgacagtatggtcatctttccacaactgagtaaactgaggctgagagacatcaagtaacttgtccaaaatgtcacagctactagacgagagaagctgagtgtcaaacccaggcctttccaaacctgcaaccccagacaccatcacaccagtcccagcatgttctgactcctggttccagggcaacttttaccacctcgcaatttgtttttagtgagttttcaaaaatccagtggaactattaaataaagtatacttgcatgcaaattgtcttatgtggaaaagcgccattataaatgcaagccattgcgattcttcttgttttaattcaggtcacagattttttcttctgccaattttgcattaaaaataaacacattaccatcgatcgtcaccatcatttcataaaagaaaaagcattttaatgccaaaactgggcaggacataattgtagaattatgtgaaaaggagtcctctcaattgaatgcactcaacattatggaaaaatacatcacagtattattgtttttctcactgctgaaaatcttgggttcatttgggcatccccaacctagacaacctccaaggtaccatttcagctccaaaattcatctgcacatacgctgtcattctttgctaaataagaacactctttttttttttttgagatggagtctcactctgttgcccaggctggagtgcaatggcataatcttggctcactgcaacctctgcctcctgggttcaagcaattcttctgcctcagcctccccagtagctgggatttcaagcatgcaccatcacacctggctaatttttgtatttttagtagagacaggttttcactatattggtcaggctggtctggatctcctgacctcaggtgatccacccacctcagcctcccaaagtgctggaattacaggtgtgagccaccacgcccagcccaataagaacattcttaaggagcagaatttgatgacagccttcagcaatagaattctaactacttaaacacacatttttcttcagccaggtccagaggtcactaaacatctcatcaattcaattgtgtctgtggaaaacagagctgtggtttggcatcccggagacaagccccatgtcgggtggctgtttttgcttcggggctgccgctgtctcctctggccaggtgctcagaaggggagatgattggttcttttcctcttctgcattcctggggaatggggtgacacccctatattcatcatgcttgttattttataatgttttgacatctctggggcctcgctggccaggaagagactgcccctcccagagctggctaattcctagaggtaataacaactccctttgagggcacctttcataggcaaatgaaccaggcccaaacccatatccccaaccaccttctctaactctcacccaccaagccaatacttccctggccctaaatcaacccaaggccagctaccaggcaacgggacaccagccctagagcctagagcccagagccctcgacatgcaaatcagccagccctgcatggttctcctgctctgccctgcctttccagagaaaaaaccaacaagggctctgggccttgcagctttggggggctcagtccactctgcccaccacctccctgggctcaggtctgcagccactctgcaagctcttccatacctcagttgctattttctgaggtggaggcgcctgtgacaccagccttcctatggcctggaatccagccttgagttggattcctggcccttctgtctcctgaccaaaccaagtgcttcccccgtggccttgcatggtgtggaatggccccatctctcaaaacctgagctgaaaatgttttgatgacatgagcctctccacatgctcagtcacctctacactaaagacccacaggtaattttaacacattccccttgtgctgagctcagttccttacacccctacgagtgctcaggaaagagaactgccctctctctgccctgccctttccatggcctgatgcccttatggcctgagccttggggtgcccctgacaaaggcattcacacttaccagcccctgaagggctttgtctatgaaattgccattgaatgctagaagcagaaaaaggttctccatgtagggtgtggtggctcacgcctaaaatcccagaattttgggagaccaaggcgggcagatcacctgaggtcaggagttcaagagtagtagcccggccaacatggcaaaaccccatctctaccaaaaacacaaaaattacccgggcatggtggccggcgcctgtaatcccagccactcaggaggctgaggcgggagaatgatttgagcccgggaagctcaagaggttgtagtgagccgagatcgtgccattgcgctccagcctgggtgacagagcaagactctgtctcaagaaaaaaaaaagagaaagattctctggcaggggatgcctgtgcagccactcaaggctgggttccaggccataggaaggctggtgtcataggtccttccacctcagcacagcaactgaaggatggaagagcttgcagagcagccacaggcctgagctcagggaggtggtgggcagagtggactgggtcccccaaagctgcaaccatagatcaaaggagcaggagagagaagtcaggaaagttctgagcacaaccccaccccaaacacacatggagtcctctcctgacccagccacatatggaagtcaatactgccaacagcaaagacatttggcccagacattggccaccgagtcctcccagaacatccaaggaagatgtcctgaggtcactatgtcagcaaatggccacatctcgaccaggtctttcccaggtccaatgctgtgctcatctctctgagaaaacacagggggaaggaaacctggagacgcctgtataacacagaggacagggactcagccacagggccatgggctctgcagagaggtagcctcttcgtggagcaatactgaggatcatcaccccgggcacatccaggaatgaagtgtctctgaacctcattcagtcatgtcagtcaccatggcaccgtcagtggttcctggaagttgtgtcacccaaaagtgatgggcacaggggccatgttccccatccccgtcctcctctctctgtcctcatgccatgatctcagctgctctgctgagctcacactcccaacccaccagcctcccacccctcactctggccctgtggagtccccagagagggggacatgagctggcctgagctgcccagtgataggaactcaggaacccgaggaggctcagttcatgggttagagagggcccaaactcaggctgagtgaccccaggccctccggtactgcctgcaggcaagatggcagggatcctgccatcctttcaggctctgagtggatgagaggggacccaggctcaatgagcttgcacccatccaaggggaagaaatgaccccacagggtcaggcttgactcacgctgcttctcctggaggatgctggatgtgcacggcgcggtcccttctcctgcagaaaaagaaaagaaacatgagcagatccttgacactgttgccaggcactgtgtttcccagggaggctgcttggagctgcctctgaccctcactctagagcttgggatgggcagaagtatctcctaccacttcatgccctgctctgccctgacctgacctagcccttggcccttcatgccacacctgatgccatttctggggagagtacggcctggctcctctgcctcctcaggcgttttcacctctgtcttgtcctccagctcctcctctcctccctcctctataaagcagcggcttcccaggagctgcctgcctctctatactcactctctcctctgagggtccacactgaactccaagcccacaaaccactgccagggctctgcctctggcccaggcctctccccttagctctggatctgcatatcccactgccccccagacgtcttctgtggccactcccaaacactgcacactccccatgaccaaagcttccctagaagtctgcggcccctcccaaaatgtgtctgtggcttcctctagggccccaggtctctgaggaaggtttccaaggcagaaagcgaagtcacctcctggtctccccaagggactcgagaatccttccccatgcaaagctacctcatttcttcccctacagaactgaagggcaactccagtctaagaacctcctccatctccacagcccacactccagggcctggtagatgactcctctcctgaccccatgcctgcctctcacaaccccgtgcctgcctctcacatgaaacttctccaggtgttcatcagaatgaacttctccaggtgttctccagatggattcattagaatccatcaccctgtttctgtagccctctgcctgccagggccatcttcatggcccacgtcccctgaatcctggggtcatggcccccgggctctctcaaaagcaggcaggggtaaacaatgggaagagtgtccagctggaatctggaggctgactccattttaggctccctctggcctgctgtgtgatgtaaggcacagcactctccctctctgggttcattcctacaagatagcacggatccagtgctcgctaagaacctccaggtcctgaaagcccttgagtgacactgcattataattggatacctggattcaaatgccagcttcttcacttacgaaccatgcacccttgggcaagttacacaacctgtatatgcctcaatcttccaatctataaaatggggatagtactggtacttgcctcggagggttactgtggatattaaatgattaatatatgtaaagccggctaggcacggtggctcatgcctgtaatcccagcactttgggagacagaggtgggcggatcacctgaggtcaggggtttgagaccagcctggccaacatggtggaaccctgtctctactaaaatacaaaaactagccaggcgtggtggcgcatatctataatcccgaagctactcgggaggctgaggcaggagaattgcttgaacccaggaggtggaggttgcagtgagccgagatcacgccactgcactccagcctgggtgacagaatgagactccgtctccaaaaaagaagacaaataaaatatatatatatatatatatgtaaagccttcagaacacagtcaggcacaaaacaggtgttcaataagtgaggatggctctgattcttgttttatttacttgtttacttctaaccattgattcaagaccttgtcccttttgtcttcatcatgatcccaggtgcagccagatagagacaatcaatggttaatgctagatgccagctcacagcactccctagacctaggggccgtgacaaagcctaggcccaagaggggcccagatagagaacagagacctggacaccgtcatagagcagtccccacacagcacaataggatggacgcagactgtttcccaggtgcaacagcagcacagatgtggacagaaacaaggaatgacccagtatccaatacacaggtcagggagcgaagaccagcaccatgtctgagcaccagctaaggcccatgaaactctggcgtccctaagaagtcaactttgaccacccagcagagctggggcctagcagagaaattaagacataagacatgcattcaaaaaacgccttctatgggccaagccccatgctaggggccatggaggatacagagatgaggaagtcagagtgagtgaggagcaagaacacctctgtgcagagaagcacacggctaactgcaatgagaggcgagaccggcggggagagacggggagggaaagattcattctgactgaggactccaaggaagcttgtgccagagcagagatttcagttttgacagtagaggaaagggcatggcattccaagcagccagcaagatcatgtttatggaatgccaagttcaaggcaaagcgggggtgtgagagagcatggtcccatttacagataagaaggaaggaaggcaggaagcccatttacagataagaaaaccaaggcctgaagaggtgaaggagcttgcagactcttccaaatccaaacctcctgctttttctatcatactccaccaaaaccagctgcataatgaggaaggcctcatgcaaaaaggaaatgccgggtcccttgttcaaacagaaaaaaaaaatgttgctaaaggtactaaaatataacatttttccttttccctgaggatgctctaaaacctgttatggtgttttctttctttctctccttccttccttcctttctattcttttcttttcctttctctctttttttttttttgacagagtctcattctgtcaccaggctggagtgcaatggtgcgatttcggctcactgtaacctccgcctcccaggttcaagcgattctcctgcctcagcctcccaagtagctgggactacaggcacccgccaccacacccggctaatttttgtatttttagtaaagatggggttttaccatgttggccaagatggtctcagtctcttgacctggtgatctgcccacctcggcctcccaaagggctgggattacaggcgtgagccaccgcgcccggccagtgttttctatttgctactgtatttcctcatgcccagggagacttgagggatgagtgcaggccctcccaggccccagggtccctgctccttagcttggcacgtacacacaggctccaccagcacccaggatccccctcctgccagccactgggccaaacaaaccatgctgtgagtgacagttggaaagttgagccaagcatgcacccctcccacaggcctgctggccccatccagggtagacaagagtattgcaacctccatgctgaaacgcactagttgagtgagaggttttttccctctgaatcacccttggaatgctctatggcactgccagcccagggtggggacagctgcctcgccccaagacatggtggagtataagcacctaacctcagccctgcctgctcccaggctctggcttggagggaggccagcggctgtccatgggcaggggaaggagaagaaagctgggtgggggtggggctgagaagccagagggcaggagagcagcaggccaagatcccaggaggcttcaaggcggcaggaggcaggaccatgtgagagccgcccaccaagtacccccacacatatgcactgtcccgtcagacttcactcacaaaacacaaacttggccgggcatggtggctcacgcctgtaaacttagcactttgggaggccaaggtgggtggaccacctgaggtcaggagtttgagaccagcctggccaacatggtgaaaccccgtctctactaaaaatacaaaaattagctgggcgtggtggcgcatgcctgtaatcccagctactagggaggctgaggcaggagaatcacttgaacccaggaggcaggggtagcagtgagccgagatagtgccactgcactccagcctgggcaacggagtgagactccatttaaaaaaaaaaacaaaacacaaaaacacagacttgaagataacaccattcggacttcagaacagcaaacccaatacctgcagccctctggagcactggccctgagccctgactataacacagacacttctggcatttctcgggcatctactatgtgtcaggccctggaggaggggaggactccagcgcagggaggagccgggtctgagtcattacctccacattctcatgccaagtccatagtcggtactcacggagacagtttatgagttctccagaccatccaatactttcattaccagggtgtaaatatgacttagcctgggcaggatgtccagaggtggggaggtgggaaagttggggaggtgggcaaggatgagagctggggttgctgggaatgctggggatgcagctggggttgctgggaatgctggggatgcagctggggttgctgggaatgctggggttgctggggttgctggggatgcagctggggttgctgggaatgcagagttcagaggccggaagaagctcggggacccaggtgccaagaggccaggaggtgagtgtcctggaaacgccagtgcgcaagcttcacgtgggtaagaagagggaaaatgtcagaaaggaggtcgggaccaagctctgggactcctcaaagccagccctgagtgcggcctcagctgcataagccttgaaggctgcacctgggcacgcaggtgctttctggcttgcctagtgctttcccgcacatgaaatcgttggcttccatgcctatgcaataaggctgctgagcctcagcgaggtaaagtcacttccccaacgttgagatctggtcccttggacaccccaatactgggaagggctcttcccacaatttcaccccgcctcctattggtcgggggcttcctagagcagtggcttcccaggacggctcaggcagcctgggtagtgcttcctggaggaggaaggcatgggacagcgaaaggctgccacagtcaggggctgaggggtgaggaggacgggagcagagaaggggacatttgcaaggggtgcagagaggatgcgtccagaggcttggggactggctggtgtttgcctcgggcttcgtctctcctgcagcgcagcctgagccaggcatcccagggttcccagggctggtgaggccaccgacggggtcaggaataagcctgctgtttgatgaggtaagtgtggcgcccggacagtaggaagccgggcttgcctgcccagtccaagccagctccatcttccctggaaaccgccagcgagggaggagccggcttgaacctggcttcctgatttagcaggctcccaggacgagggtgattaaccaactgtgcagctggctcagctgccacctaaatgagaccccacttagcctagagctttgcaaggctcatgggcctgacagctttgcctctgctggagcttgtttcaagtggaggagctgccagaaactcctgcagacaggatgggctacaaggaactgggaaggcagagttttgtcatgcaccccaggctctgggccccaccaatcttgcctgtcctgaactcacacagccctggaaggctgagccacatcatcttttctgagaagatgcttctgagtcccgctaacggtttcctgagtgattttataactcttcttccaatcccctcccaacaaatcatgagttccccaagtgcaagagaagcaaagtgtgtggccaagaacagcaaagtgtgtggcaaacttctgaaacaggagagccttcctgcatcacactggagagttggtggctgcggagagagtgattcagacagacggggccttggagaataaagaattgggaattctcctgataaaccagaaagtgtcaggaacagcccctctggagcagagacaggagccgctgaagccggaatttgccctgggctctccccttactgggcattgggagccctggccaggctccgggccagactggtggctttgctcatgaagcctggctgaggagcgaagacctgcatgctccctccctgctcaggccactcccaacatggagcctcccctgcatgctcctccctgctcaggccactcccagcatggagcctcccctgagctgcaggttgagactcacgctcattacccttcacctggcccagcgtaagcccctgcactcattccccggcccctcctgttctcctccacattggcttctagaataatctttctaaaaagtggctctccgctcccctgcttaaaccattcagtggatccacaggggcactcccaagaaggcccctaactcctcagcctggcattcaaggccttcatctccagcttttccacccctgcctcttttccaagacctcccacccctttttaccaccccctagctccacacctcacccccagcccaatgctccacaccccaacctcagacaggacaaactccccaaatctccattcttcccataccttttattctacgtctttcccatgtcttttatttcatccgtatggtatgttacatcgattgattttcacatactgaataactttgccttcctgggctaaattccgcttagtccttgacaaatcttgtcatctcactattcttttatgcttggggtttttatatctcttccaggacaatttatactaacaatctatgagctgtcatttaaggaatgacaacctcatagattgtccaacctcagtcaagacaaactctccaaatctccctgcttcccacacctccctccgtacctttgtccctgcagctccctctgccctcactggtctgtcccaaccccagcaaagcctccttacctcctcatgtggcagctccagcgctacctcctctttcagccctctgtgccttgttccccatcttgttagagcaattagctcactggactgtcactgccccacccccgtctgggagccggtcaattctgagtccacttctgagtcatctgtgtgtcccctgcagtgaccagcacagggtctgacacagagtaagtgtccattcctgtgcattgcatgcataagtgagggaaggaatgtatgagtgcacagtgagcccctcaccactttgggctcagacagggaggaaagggacacacccagaaaagcacagctgtcagcagagtggtccgtgctacagacaagagaccaactcagctgtgctgggcatgaggacagtggtctgggagaggctggagtatcaaggaggcttcccagaggcagcgcatgggattgtgggagctagagatgaagtcaggggaagagccggggcaaaggcaggaagctgacgagctccgcatgagcccagggatctctctgcaagcagccccctggccatttgactaggagacagtgggggtggaagaggaggggagggatggccaggaagccatgaatatcagaatcagagataaccttggtattactgggtttagcaacaatttgacagcccctttatgtccctcatggtagctctcccagggctgtttgattcctgtagtgataggaaacttactaactctggaaatttatgattgctagaaggaaggctggaaccacattgtggatggccttcggtgccaggttgggggatctatacttcatactgcagtcaacaaagacctacttgccaatttcgtggcagaatgataggactggatttctattttagaagtgtcgtggtaggattggataaagatggtaaactgactacacgatctagtctttttctcctcctccagatccctagaaaatgacatcaagcatttttatgtgaattaatctttagtagcactgtaaaataagaagtgtccttagcagaccagaaactgtgtggcatccccaaaagttagaaggcagagagatctaaggagggaggcaggactggttacataattttcagggcccagtgtaaaatgaaaatgtgggtccctttgttcaaactaattaaaaatttcaagatggcgacagtagagtagaaaatcaagtgtgtggagccttgtgtgactgcaaaggacaaatgctcacaaggctagcccaggagaaagaaaaccataacctcaagcctgcaaagaaaggtctgtggcttggccaggcacagtggctcacgcctgtagtcccagcacttagggaggccgaggtgggtggatcatgaggtcaggagtttgagaccaacctggccaacatagtgaaaccccatctctactaaaaatatttaaaaaattagccatggggggcaggagaatcacttgaacccaggaggtggaggtttcaaggaactgagatcacaccactgcactccagcctgggcgacagagcgagactccatctcaaaaaagaaaggtctgtggccagtgatggaggcagcacagaaggaacagcaggcttatgggtgaaaaatacagaagcaaagaaagctcttgtgatcgattgtctgggcttccatagcagaggagccaggtgtcttggtcctcccccaacccctgcttatgccaagcaaagcatctgtcccaaagtgtgagaaaggatgagtgtttgaaggacaggacaccatggaaagctgaaaatacccaagaggaataaaacagaagcaactggctcaactcacaccagtgacattttctaccttctccaataattcgatgacagcaggtttcagtaaacagacatattcctatcactcagagatagataggctgacagggaactgcaaacacaaactggcatgtgcacaaatattagtaaatattagataaaagccaacaatgtggaaggaagatgtccaactcagtgactgaagggaagagggaattggacctgtggagtccttaaaccaacttagtgtcatggtcattagtggctctcaaattttagtgcatcggaatcacaggactagttaaaatgtggattctgagccccgctcccagagtttggctgattcagtaggtctaggggtctagaaatgtgacccccaaagtcacatttctaaccagttcccaagagatgttaatgctgttagtccagggaccactctttgagaagcgtgtattgagatacaaggtcataaaccagagtcagggggtgaatggtaggaaaaaatagctctctggaatgctagaggcagagaaattaatcagggatacccaggcagtgactgcttccttcctgtcaacaagaacgtggccttgctgacactgtttgttttaagaacaagaagaacctagattgtaaatcattccttaaatgatagctcatagattgttagtatacattatcctagaagagatatataaaccccaagcataaaagaatagtgagataacaagttttgtcaaggactgagtggaatttatcccaggaatgcaaagttattcagtatgtgaaaatcaatcgatgtaacgtaccatattgatagaataaaagacaaaaaccacatgaacatctcaatacatgtctgcaaaaaaaaaaaaaatcctgcaaaatccaacacccttttatggtaaaaaatacattcaacaaactagaaataggagggaacttcatcaactagatgaaggacaacaacaaaagattcatagttaacatcatatttaatggtaaaagactgaaaaccttccccctaagatcaggaataaaacaagatgtctgctctcatcacttctattcaatattatgttggagactctagttaaggaaattagataagaaaaggaaataaaagctatccagattggaaagggaaaagtaaaactacctattcaaagacgatgtaatcctatgcatagaaagtactaaagaatccccccaaaaataaaactaaaaaatgagttcagcaaggttgcaatatagaggatcaatatacaaaactcaattatatttcaacacacttgcaataaacagtctgaaaatgaaattaagaaaacaatttcagttacattagcatcaaaaagactaaaatacttaggaataaagttaacaaaacaggtgcaagacttgtacactgaaaactttaaaacatcattgaaagaaagaagacttacataaatgtaaagacatctcacgttcatggattggaactaatattgttaagatgacaatactcctcaaattgatctacagagtcaacacaatccctatcaaaatccccactggcatttttgcagaaatcgacctaaaattcatatggaagtgcaagaagcacagaatagctaaacaatcttgcaaaagaagaacaaagctagtggacccccacttcctgatttcaaacttactgcaggtgtacagtaatcaagactgtgtggcatattaacatatacacctgagtggaatagaactaggagtccagaaataaacccatatgtctatgatctattgatttttgacaaacctgcctaaacaattcaatggatgagagatagtcttttcaataaatggtgccgggaaaactagttaatcacactcaaaagaactcctagctcacaccatacacaaaaattaattcaaagtgaataaaagacctaaatataagagttaaaactataaaactttacaaagaaaacatgggggtaaatcttcatgaccttggattgggcaatggtttcttacatatggcaccaaaaggacagacaataaaagaaaaaatagataaaccaaacttcaacaaaattttaagatttagtactccaaaagacattatcaaaaaaaaaaagtataaagacaacccacaaaatgggagaaagcatatctgataagggtctggtgtccagaattcattaaagaactcttacaactcaacaataaaaagacaacccaaattttaaatgggcaaaggatttcagtagacatttccccaaaggagataaacaaacgatgaataagcacacgaaaagatgctcaacatcattagtcattagagaaatgaagatcaaaaccgcaatgagacatcacttcacacctgctaggatggctatatccaaaaaggcagccagtaacaagtgttggcaaggatgcagagaaattggaacctttttacattactggtggaaatgtaaagtggggcagctactttggaaatgaatttggcagctcttcaaaaagttaaacagaattaccatatgatatagcaattccactcctatgtatatcagcaagataattgaaaacatatccacacaaaaacttgcatatgaatacttatagcagcattattcataatagccaaaaagtagaaacaactcacatgtccatcaactgggataaatgagacatggcatatccatacaatggagtaatattcagccataaaacaaaatgaagcactgacttatgctacaacgtggatgaatcccaaaaacattatgttaagggaaagtagtcacacacaaaaggctatatattgtttgattccatttatatgaaataccaggggctgggagaaggggaatggggagtgactgctaatgggtatggggtttcttttttcagaaatgaaaatgttcttgggccgggcatggtggctcatgcctgtaatcccagcactttgggagaccgaggtgggcggatcacttgaggtcaggagttcaagaccagcctggccaacatagtgaaaccctgtctctactaaaaaaatacaaaaattagccagacctggtggcgggcacctgtaatcccagctacttgggaggctgaggtcagagaatcgcttgaacccgggtggcagaggttgcagtgagccgaggttgcaccattgcactccagcccgggcaacagagtgagactccatctcaaaaaaaaaaaaaaaaaaagaaagaaagaaaagaaaaaatattattgagctagataatggtgatagttgcatcccttcatgaatatactaaaaccacactgaattgtacattttacaaaaaggtgggttttatggtatgggaattatatctcaacttctaaaaaagaatttggcaagacctgcttcacttgaatagtgttaatggcagctgtgtgcctccttagatcattcaaatcaagatgtctcctgctctgtgttgtaatctcacctatgatctttggctgaataatccaatcttaagtgtgtagttattcccacccatatctaacctacagaaaactctgaaatgttctaaaacaagcagaaggagactttaaaaaatgtagcatgagcccatgcttccatgaattaagatcagattgctaatcaaaagaatcaatcagagcacatgaaaatgaaaagatgattttaaaaaacaaacaaacaaaaaaacaaaccccaggcctggcacagtgacatacgcatgtaatcctagcactttgagaggctgaggccggaggatcgcttgagcctaggagtccaagaccaaccaagacaacacagcgagaccctgtctctacaaaaaattaggcaggtgtggtagtgcaggcctgtggtcccaactactcagaaggctgaggcaggagaatgagacccaatctctaaaaacaaaacaaaatacagaagagctgacctgcagaatggagactgatgaagagaaaatgggtgagctgttggttagagtcaaagcatattctcagaacccaccaaggaccaagaaataagaataagaagaacaaggtaacgtgtggttagaaaagtctctggaagagaaagaaatacttggccgggcgccgtggctcatgcctgtaatcccagcactttgggaggccatggcgggcggatcatgaggtcaggagattgagaccatcctggctaacatggcgaaaccccgtctctactaaaaatacaaaaaaattagccaggcgtggtggcgggcacctgtagtcccagctactcgggaggctgaggcaggagaatggcgtgaacccaggaggcggagcttgcagtgagccgagatggtgccactgcactccagcgtgggcgacagagacagactccgcctcaaaaaaaaaaaaaaaacaaagaaagaaagaaatacttgaagaaatcatgaaaagaaggcttcacagtagtgaaagagcacagccaggtatggcatgaccaacaaacacctccacaacaaaaacctactcagaaacgtcgcttgaaatttcagaatacaaggactaaagatgtaaaaaacctaaaggctgggcatggtggcaaatgcctgtaatcccagcactttgggaggccgaggtgggctgatcacttgaggccaggagttcgagaccagcctgggcaacatgttgaaaccctgtctctattaaaaaaagaaagaaagaaaaaaaaatttaaaaacgtaaatcttcaggaagagtaaaaaccatattactcacaaaggaatgagaatcaaatttatctcagacttctcaccaacatcactaaattcaagaggccatggaggaatagctgcagagatagttgggaacgtgataatggaggcagataagctcacattcaaatgagcaagcaaaataaagacatgtttagcaatgcaaggacctagaaaattgctatccacagttcctacctgaaagaattactagcagagacattctagtgaaaagagaaagtaaatccaagaagaagtcaggaaattgaggaagtagcagtgagacctatatgctacaaagggcaaattttactgaatataaatcatagctcaaaatacttaacccaaatagaatgagaaggagggggaggtggcggaggagttgtcactgccaaagccaccatgatgagaaaacaaaaccctccccaaaagtaaaacagcaaaactaatcattaagttgaaatgagaattggcaacatgaaaccaaatggccaggggccatgggagctggggagttaggaagagaaggaagaaaaaaggtacaaacatccttccctgttcagggatagcatagatagagctactgacttaatccaaaccctggtagaaaatgccagtttttatttttaatttttttttttttgagacaggggctcattctgtcacccaggctgggttgcagtggagcaagcatggctcactgcagccttaacctcctgggttcaagcaaccctctcacctcagcctccagaataactgggaacacaggcacatgccatcacacccagctagttgtttaattttttgtagaggtaggagtcactctctttacccaggctggtcccaaattcctgggctcaagcgatcctcccacctcggcctcccaaagtattgggattacaggcatgagccactgtacctggccaaaaataccagttttcaaatgtatgttaaaactgtacgtttctagaactacaaaaaaaggaggtatataagaaatttgatggtgtcaataaaaaacaagaaaaggggaaggagaaaactgtattgataatatctttaattttatagagaatttataacccaacatatacagtatatagataatgtatatattttttaactcataaggaacattcacacacccacactagaccagggtttagacaagaaagaatttcaaaaagatatcacgttagggtcacattgtccgatcatagtggaatcaaattgctaattaacaagaaaaaaatctatttgtcaggattcttgtacatggctctcaacagctctttgggtaaagaggagaacgtggaggttttgaactatgtagacatgatggacagtgagggggctacttatccaaaccctgtggaatgtgtccaacatggctggatgcaggttttctggggactgaggttatacaagtttggggtccccttttaaggaaaagattatccccccaaaaaagcttacttttataaattttaccaaaaaaaggtaatgggtaaaaaagcaaaaaaaaaaaaaggtaaccttgctaggaccctcccttggaagggaacagtgcgtgtgtcatttaaaaaataagattaaaaagctcttatctctagaaatagaaaagcacaaatcacataaattccaaggaagtagaaggaaataattaatgaaataaaagcaatgttaatttacaaaaactaagtagagaaaacggtagacaatagaactgattaataaaagtaagagctatttctttgaaaagaccatcgaaataggtaagcctttggcaaaacttactaagaatgagagagaaagagaaagatggagggatggggaaaaacacaaatgaacaatgaggggaatgagaaagaagtcataactttcggaagttaattgttttcaacttgatgaagggcatttctggaatcctagggcgagggccatgtttgttggtaaaacattggaacgtttccatcacagcactacagtcaggatccaaccagaaagcccgctaccgcttgtcactctgcattgacctggagatcccatgcaatgcagtttaaaaggaaaaataagaaaggagagtaaatgctggcaaaaatataactgttaagatttgtaggccgggcatggtggctcatgcctgtaatcccagcactttgggaggccatggcgggcggatcacgaggtcaggagatcgagaccgtcctggctaacaaggtgaaaccccgtctctactaaaaatacaaaaaattagccgggcgcggtggcgggcgcctgtagtcccagctactcgggaggctgaggcaggagaatggcgtgaacccgggaggcggagcttgcagtgagccgagattgcgccactgcagtccgcagtccggcctgggcgacagagcgagactccgtctcaaaaaaaaaaaaaaaaaaaaaaaaaaattagctgagcgtggtggcgggcagctgtagtcccagctactgggggactgaggcaggagaatgacgtgaacctgggaggcggggcttgcagtgagccgagatagcgccactgcactccagcctgggcgacagagtgagactccgtctcagaaaaaaaaaaaaaagatttgtaaacaaggctggatgcagtggctcacacctgtaatcctagcactttgggaggccaagtcgggcagatcacttgaggtcaggagttcgacaccagcctggccaacatggtgaaaccccatctctactaaaaatataaaaagtagccaggcatggtggcgggcgcctgtaatcctggctattcgggaggctgaggtaggagaatcacttgaacccaggaggcagaggttgcagtgagccaagatcacaccactgtactccagcctgggtgacagagcaagactctgtctccaaaaaaaaaagaaagaaagaaaagatttgtaaatgatgtgatgctgtaactagaaaaaacccaagagaatcaactgacaaactattagaaccaacaggaaatgtcaccaaagtagcaatatttcaaatatatagcagactaataatttacttccagaatatatatgaagatctcctaaaatccaataaaaaggataaacaatccaatagcatattggcaaaaattatgtttaagaaattcagaggaaagaaaatatgatcagtcaacacatttatgaaaagatgttcaatctcactagaaactgggtaaagacaaagcaaaacaagaaaacgtttttacccgaccattacataaaatgttgaagtttgataatatcaaatctggtaacacattgtggggaaatggctaacttaatccatggttggtgtgcaaatataaatttgcactgttttttggaaaaccatttgacagtatctattgcaattttcagtgcttatactttaaacccataaagcattcttataacaatgaaagattccaatgtctatcactgcagaatggttaaataaattatggtacaactatagtagagaatattatagtacaggtaaagagaacagagtgaatctatatatacccatatgaaaagctctccaagatcttctgttaaatgtgagggaagaggtaagttgcagcactaatgtctaataccatcgacctctagagagatacgttgatcaactccacaaggaggtctgtaattgaaggaataactaaaggagactttggttttatttgttgtgtttgattttttccaatgagaatacatttaagaaatcaggtggatatttataatgtttgtagcagcattattcatggtagctaaaacgtggaagcaacccaaacgtccatcatcagatgaatggataaacaaaatgtggtatatccatacaagggaaagttactcagcccccaaaatggaataaagtactgattcatgttgcaagatgaacgaacctcgaaagcattatgctaagtcaaacaggccagacacaaaaggacaaatactgaatgatcccacatatgtagggtacctagagaagtcaaattcatggagacagaaagtagaatgatgtttaccaagggctggggaaaggaaaatggggagttggtgtttgacgggcacagtttcagttgcagagagtgaccaagttctggagatggttggtggtgatggttgcagagcgatgtgaatggacttaatgccactgacctgtatacttaagaaccgttaaaatgggccgggtgtgatggctcacacctgtaatcccagcactttgggaggccgaggcaggtggatcacttgaggtcaggagttcaagactagcctggccaagatggcaaaaccctgtctctactaaaaatacaaaaattagctgggggtggtggcggacgcctgtaatcccagctacttgggaggctgaggcaggagaatcacttgaacctgggaggcagaggttgcagtgagccaagatcacacaactgtactccagcctgggtgacaaagcgagactccgtctcaaaaacaaaaaaaattgttaaaatggtaaattttatgttatgcatattttaccacaataagaaatgttacacaaaaataacaagacaaacaattgcaaaaataataatagtataataaataataatatttgaacaattgtaaaataatagtaataacaacacgcttctgggtgttcagctggtgctgaaggatccctttccattaaaaaaaaatatatatatatactgggcaatatgttgccaaaaaagataaatatataaccaagcttaaaataaaaaatgtataatacacagtgccagaaacaaaaaaggaatccagagacgaaagcagaagctgagatagaggagatccgtgaatcccatgagtcagacgaataaagaaagaggctccagggccagagcctaaaaaccacactgtgaactccaccaacctgacctcagcctgtggatggcaaggagctgatgtggcacccactttatagcagggacacttgaagggccattccatccttacaggaacttacaaaaagaaccttctttgcggaagcggcaaagaaaccattcacagacagtgagagagaaaattcacacatgagtaattaaaaccctaagcctgtgccacttctgggtgtagggtctaaatttacaccacccatgtagaatggaaactctaaactataaatttagcctataaaatattcaagattagtgaaacactcaggcccagcaggaaacaaggccggtctttatgaggacattttcccaacctagggcacaaaagacttcccccaaaaagaaaagagaggtatgtgtgaccaagatgagttcacaatcacaaatgagaaagaagacccatgaggtatatttagtgtgcgcacacacacacacacacacacacacacagagcagaattaacacccttgagaactggagggatgagagcagtctgaaagtgctgatgaaatatatgacttaaatggttagggagagaaaaggtaaaatacaaaacagaattcaggcttaaagggaagaaggttggctccatttggaatttgtggagcataaggagtctttaggacatccaggtagaggttagcaggaggttaccaaaaatgcgagtgtggagcccagaagaaaggtcctggctggagatagagcaaggagttgtcatcgaggtggctggagcacccatggaggcagtgtgactggccagagcgtccagcatgaggcaggggaggggggcctggaatgagtcctgtgtctaagggcaggcaacttgaagaagacaagaggatctgctctgtctatgccaccaatttccattgcattcctttccaggaagagttcacggatcttcctttccccaagatacttcccagagcctctcagagccttgtcccagcctgccttactgcatagtaacccctggctctgatctgtcgcttccactctgctgcaagcttctcaggaatgacaaggccatcctgcttgtctttattccccctacattgagcacagggttgagcccctgtgatggctccataaatgattattgaaatgaatgtgtgtgttctgtcatgttgtgggaattcacattatgaattcacacgagaatgggacttggaaggagctggaaatccagctggtttcctcttcctcttaccctctctcctctcttcttcccgctccccattctgtactgggaggaaatagtaccaaccctcggactcaggtaagcactgcccttcattcatgagcatcaggaagcatttgtgagggctgccacttgtgcaacattggtcatgcttctcccccttccatcattataagaatgacctgctatcgaatgcactttgcaaatatcatctcatttaatcatcacagcttttttactagtcctccactctgcagatgaagaaacagaagaccagggaggtgatgtgacttttcctgaccacacagccatggagtggcatggctgaagttcaaacccaggcctctctgactccagcactgcagcttctgcctctgtcctggacctcccgctgtgcttcctcgtcccctgccctccagtgccctcccagctcactctgcctcttgctcacctgaccgactgcccttagctctcactgggtctgagtcatacattctttagcagacaagtggggatgggggatgggaaggggatggccaaatggatggtacaaatccatatttgtcttttcaaggctacaagcactattgtggggcaggacctagaatccatgaccccttctaggccccctctggggttcttgggatgaaggaaagagcagcaaaggacccactggcagatacatggctatgacgactggtaagttgtctctggattgcccttgggggccagagtcagagcccccccttctcgtggatgggacagtggtacagggtgcctttcctttcagactcatggttccttgagcctgactttgttggggcccagaactgtgccaagccttagtccagtccgggaggtgaagccctggactgggaatcagaagaccaggaatctgagcctgatgttgccaccagcttgggggactttgggcaagacgtggctcctctgagcctgggttctttgttggttagatgggatgaccacaccaggcctgcccatttctcaggatgagtgctttggcaaaaggagagctctgaaccaaggaggcaaggatggggatgagaaaaggaacaggaacagggcaagatggtcactaccaaggcagccgttcccgtgggctgggccaggaccatctcactgaatgcctcctgagagcatggccttgcccactcggcaactctgggccagagcacgactgcgaatgacaggagcaatagaggaaggagaagagaagatgaagaagaaataaagtaggaggagtggtatgtggggtggggaaggagggatggaagaaaccaacttgagggtaacaggtacagaggttagcaccctgcatcccagatgtgggtctagccctggctctgcttctcactccattgtaacattaatcaaatacagccctcagctgaagatctctgagctcagtttcccatatgtgagctcagattttacgacatcttcagccacgttgtccgtttgaattttaaagccttgccccattgcttcactgtcaggagcccttcctggatcccctctcctgcctcctgaaagtcatgcctctcccttctgagctaacaccctcagcttaagcctgatccacatatcttgacttatacgtgtcacacatcacaagacagaggcctcagatgaatcacctttggttgctcctgccaagcacttatacacagtaggtgctcaatgagcctgttagtgatgaacaatagccaaacagatggatagatggatgccaaaaagaatcagcctgctttgtaggctgatcaaactcctggtcaaaactcttctccatagaaagcctcctggattaatccccagccatatactccttcttcaacaactccaccaaaggaaatcctgattctcactgctgtccttctctctccccttagacctcagctcctgtcctgctcaaaggctcctccaactgtcaccctccttattcagcagattccaataccaaagacctggcagtccaaggagcttggacccaggcacctgccattaaccacccgtgccactggggtagtcattctgtggacaaaggaagctctgttgaagtaggctggagcttttatgccacagaaaaccccacagaagtccccatgagagttcctgtaagtggcaaaattcagggatgctatgaaggaggaaccaaggcagatagactcttcacagaaggcccaagccccagccccagtcaccagccctacagccccccctgcaacacacctatgtgcacatcctggtcatgagagaagcagagtctcaccttgatgctcgtccagtttccccatggtctcgatctgctccacgaggtcattggagttccactggctcatcccaatgaggatggcattcttcccttcagccatctcctctgtgggaagaagcagcggtgagcagaagcaggtgcagctagggataggtagccctatcaggagcttatgtctgagggacattttctcttgtcctatttcttccttgagttgaggtacacctcaactcttgaaggtgtctgtagctagacagttacaagacttgcagagatttatcattgaaagaaggtactgttgtaccctactgggcctccacgtgcaacagcaaaagaaagtaacaaaaagcctgaaaccccatagaaagtaccattcctagcactgatggcagtatctcttgaaagtcagtgtgtttgggaagaaagagcaaaaccttgtcatttgcaagcagtttttctttaaattactgacttctctgaccctcgattttcccatcactaaaatggatctggccacagaggtgttgtgaggattaaatgagataatggatgtaaaggtcttagtgcagaggaggtgctcatagatgagagcaatcatgatgatgtcatcacatgagaagtaactcaccaccaggagttgagtggatgaggatttgtgtgctgcagaagcagctctggagtaactggaggagaagaaaccttccggttctaaggaagctttgacttgtatggaacctttagcccccatctgaactttatgaccctcttaattcctccattctctcccactcctcccctcaaccctgtctctatccttgttctttccttgtctgagcatagtgagtcttctgggagaaatcagtggggctatattccataaccacgctgaatacaaggccctgggtcccacacatcagatacacacatctggtaccatccctcatcctacaaagggacatttcttcaaagacaaacccttaggcatgtgtgctctcctccccatactttgccgaaaaacagatgtgcctttctggtgaagagctttgtgccctccctcgcagaacagacatcaaagggtgttgaggacaatctccaagcttatgataattaagaataaagggttgagatccatttcactgccaaagaactttacctagcagaaggaatcaatatggtgcatctgaagctttgggagctgtccagagttctgattcactcaagagctcagttgaccagacccccaattctggttaggacatctcctcctgtcttattttatgtatctatttgattgacttaacaacacttatctaaccgttaccatacactgagattattataagtgctttacaaatattaactcgattctcaaaacaatacaaaaaaggtaaaattgttattatctccattttatagacaaggaaactgaggcacagagtagctgagtaattcttgcccaaggtcactggctagagccaggatttaaaaccaggtatactatttcaagagtcctgaaatcctgccatcctgatagcctgccctggacatcctgtattggctgcccacactccagccaggcaccacacacattcggacaatttcctgagcccagtgtgttccatctgggaactggtttattctgtgctgggcagggccctgaccaggttccagtgcagatcctgctgcatgtgagctttgtgcttttccacaccctccaccactgtgtctgctttcctatcttttaaacaacaataacgactcagggtctatagctctgtctagcaagctgctgtggggacaaataatatagcaaatttgaaaatacgacgcaagtcaaggtgctgtaaacaaatatgaggtgatattattcttcgggaagcagaattatgaagaggttaagagctcaattctcatgttagattgatttttttcaatcctggacccaccatctgctagcaatacaactgcagtttcctcatctaaaagtgatatcatcgtagggcctctgtcattggattgttgtgagcattaagtgagaagatgcaggtaaaggtgtttgtaagagtgccccacacacagtaaaagcacaggctgagatgccattgcatgatggtatcatcatcaccagcaccaccaccaccagtaggagcatgggtgttatgccccacactcactcttggttccactcctgctgttgttggcccctatgacattctaccccagctgtagagtgaggtaatcaggatcagcccaattaccaccttgagttctttgtctcctggttcagttactcaagcatggagctatccatttgttcattctagcattcaatctacggtgaatagattcctgagcacctactgtgtgcagggtgagacacaacctccctcctgctggaatccagttttgtgaaaaacatgatagaaatacctctgacataagctaagagagccaggtatgcagcaggcactcagcacatcctagctttcttctacagtgccataagtcctgtcccagtggtttatgcaaggctactggaaccctgtggggtctcccagggctctggaggtctgagcatgcctactcctgcatggcccaggccactttcctctttttcctaatcaccagtataaccctgctccatctttggcttttgggcttttgtctgtttccgatcaaatatgtccttctctaccagagtctcaccgtgcttctctcacgctttacatctggccctgactcactcagatctgagctctctggacccctttctatgggtctgtgtctctcttggtccttgtagttctctttgcctctcccaagctctcccatgctgcctgccacatccgtatctctctctgggtggaacacgtatgcattgccttgctctcttctcaccccagcatctctctctttcctttctctgggtctcatcttatcaggctgggtatgtctctttcttgatctctctcattctctatggatttctcttttgtctctctgggtccctgtcctcaggatctctccagccccctgctccctaagggtgttctccctcccctccctgttctctcttgctatgtgtgtgtgcacgtgtgcacgtgcatgtgtgtgtgcatgcatgtgtgtgcatgcatgtgtgagtgcatacatgcattgtgtgcatgtgtgtacatgcaagtgagtgtgtacatgcatgtgtgagtatgtgcatatgtgcatgtgtgtgcatatgtgtgtggccctctctccctcctgctccctctcactctctgctttatcttaccttctctggcattctcacactccctgcccctccgcccatccctgtctctctgctgctctgtgcaccctcccaactccccaacatgctttctctcccacactcagcctttacgtcttcactctggcaacaattggcttgtcccctgagaagcaacaagaacacacacacacacacacacatacacacggaagcagcagcagcaatatctccttttggagccattcaggcaaagaggggagctgcagggctcagcttgaagtctttgctctgcttcccacattgtaggacatgcctccaacaggacctgtggaggccacagcgtgctcatttgtataaacgccctggttgattttgcttttcaccttctgatgactgtctcctgcatgctaattctcatcctggtgacctctgcttcggacatggttttagcatgtacttcaccctactgagacctgacccagctctgattaagctccaagctgagcctcacccactgtcacaatagccctggccttgaccacagattgactctgaccctgaccaaaacctggttatactctactcctgtaagcacaacctacaatgccataaggaaagcctttcttcctatcctggagcttctgtttctactgttgacaggactccagagtaaagaatctctttgtcttggccaggcgcagtgactcacacctgtaatcccagcactttgtgaggctgaggcgggcaaatcacaagggcaggagttcgagaccaacctgaccaacatggtgaaacaccatctctactaaaaatacaaaaaattagctgggcgtgggggcgggtgtctgtaatcccagcaactcaggaggctgaggtggaagaatcgcttgaacccgggtggcagaggttgcagtgagctgagatcgtgctactgcattccagcctggtgacagagtgagactccatctcaaaaaaaaaaaaaaatctccttgtctcatgccaggaaagcttcacctccagctcatggagccgagggcttggtcacattctgcagatggcccatccagtaccactcatcatcaggcccacaacatggatttctccaaggacctagatatgcattgcttggggctctggaccacaagattgctcacattcaccttgcactgcctaccacatgcccccatggcccccctatagccaataccatgactccctcttccttgtgaggggcagtccccacacagcccatccccagacatgttggggctggttccatggcgttctcttttccacttcccctcccccaatgggggaaaaggtagagggagagtgggggcctgtggcacacctgtgctttgcttctgtgatggctccttggcccaggaataatcacgcagcttcccacggtgacatccttccactccctccaggagacaaacagttctacccttgccattctacagatgaggaacctgaggctcagagacccaagacttgcctgagatcagagggcagacagtcagtgacaactatcatggaaacctggtcctctatgcccagaggacacatatcattttcttctgttcccccttctctcacccttggggttggaaactgccgggaggctgagtgatcacagggaaagctcagatcaaaatgagaaggcttggcatgtgccccccattctctgtgagacctgaccctgactttgaaatttcgtctgtaaaatgggatgatttagccgtgcactaccttcctctcccaattgctatgggaaaccaggagttagaggcacaagcagattccgcaacacagaacccagctcctcaggccccagcctcccaccttggggagtgggggaggggaggaccagccaggctggccactgagagagcaagaaaccaaggacacaaaagacatgggggtaaatgcagaaaggaggactcctccagcttctagctcagagagttcccttagccctgctgaaggagacaagtcttgtgctttgctcttgatccagctacccagtgccagacgtgccctgagagtaaatcctagatccaccaccaccaccaccatacccagcccattcctggccctgatggcatttttgtctctgcaactgtcagggcctggcctgcttatgcatattcatggagggagggctatttagatgctggagggggttgggaaaccgaaagaaaagtatttcccattcaagtgagggaatggacctggacaccacagccaacagagccttgcaaggccatggggagcctcattgacagatccttccaggtgaagcccagcatcctcattttacaggtacagagctgtgccactggcccacggccatgcagaacctcaggggaagggctgggccaagaatcgagatcctgccaattaaaggcactcccagtaacactatctcctggcagttaatttcatgaaaccacctctgtttgtacctagatgtttgctggtacaaataattggatattgttccaattatttccaatatccaaataattggattattctttccatctaaggttaaagtgaaggatgcagctgatattttctaaatgaagacatacattttgctataaaaacagaacacaaagtgagctagtcttggcatatccagccaaatcccaaataaactcaaccaataccacagtgactgcactagccccaaccttgcatcctttcagggatgaagacttcaaaagaccgtttcatttttctctctagaacttagcgtttcatagccaggaaccctgggaaacctgggctgctctaacatgtcaacccatcctccttggtccactaagcttttcttacccatggcttctggccagactacctgtcacccagcaatcttcatccctcacaataaggagctcactcaaggtccaggcatggttccattttgaggatccatcctgcactacggactctgagttctgcatctctggccttctctgggacagggacggggtacccagggccaaccctgagcctggccaggaaagcgtgtccagaggacacccactgccttccacaatatgggctactgggtctagtctgccccctctctccttgctggggctgtgaacccacagcactgagccagtgcctccctggctcactctggccacaccagccttcctgctgttgctcaaagatgccgagcttgggtgcagtggctcacgcctgtcatcccagcactctggaaggctgaggcggacggatcacctggggtcaggagttcaagaccagcctggccagcatggtgaaaccccatctctactaaaaatacaaaaaaaatcagctgggcctggtggtacatgcctgtaatcccagctacttgggaggttgaggcaggagaatcacttgaacctgggaggcagaggttgcagtgagccgagactgtgccactgcagtccagcctgggtgacaagagtgaaactccgtctaaaaaaaaaaaaaaagatgccaagctcattccaccaatcaacactttgcgctggctgttcccactgtctagaacactcttccccctggattcgcaggtggctcatttctcattactcagctctcagctcagggccacaccccagggaccctctagcagccatccactctatcatgtccttttatgttatatggtggggacagtctccattttttaaacagcattactgaggcataattgacattccatcaactacacacctttaaagcgcacagctgggtaagttttgacatatgtacatacctgtaaaaccattaccccaatcaagctagtgaacaaggctccatcccttctagaagttctctcctgcccctatttatccctcctcccccaactccccatccccaggcgaccgctgatctgctcctggcaccacagattggttttcatgtcctagacttgtgtataaatagaatcatacaggatgtactctgcttcagtctgacttctttcacttggcatgattattctgagatttatccatattgttgcatatatccgtggtccgttccttcttaactgtaccacaatttgttcactcactgatgctcatttgggcgttttcagtgtggggctataatccatcaagctgctgggaacattcatgagcaagttctcaggtggacaaatgctttctttttcttggggaaatgccaacaagcagaagggttgggtcacatggtagtgaagtatgatttgcttcttaagcagctgcaatcaattttccaaaatgattgtatcatcatacattcccgccagccgagtttgaaagtcccagtgcctccacatcttggtaagttattattattattattgagacggcgtttccctcttgttgcgcaggctggagtacaatggcgcgatctcagctcatcgccacctctgcctcccaggttcaaattattctcctgcctcagcctcccgagtagctgggattacaggaatgctccaccatgcccagctaattttctattttcagtagagacagggtttctccatgttgatcaggctggtctcgaactcctgacctcaggtgatccacccgcctcagcctcccaaagtgctgggattacaggcatgagcgaccatgcctggcccctggtaagttattttaatcagccattctaataagtaggtattggtatctcattgcagttttgatttacagtaatgacgtcattccctaatgatgaatgacgtggagcatcttttcacatgcttacttgccatgtatatatctgctttggtgcagcatttattcctttgtgttattttgtttatggtgttttgttgttgttgtttttcttccaggcagagtctcgccctgtcacccaggctggagtgtaatgtcatgatctcggctcactgcaacctctgcctcctgggttcaagcgattctcctgcctcagtctcctgagtagctgggattacaggtgtgtgtcaccatgcccagctaatttttttgtatctttagtagagacgggctttcaccatgttggccaggctggtctcacactcctgaactcgtgatccgcctgcctctgcctcccaaagtgctgagattacagccactgtgcccagcctatggtaattcttaatagaatgtatttgcttgtgtattgtcttcctatttgtcacctaccaccaccactaggctatgagctccattggctggggcaggactcgcttgctcctgtatcccccacacccagaagagcacctggcacttgatggacggacgcaccattaatactgtggacagagtaaatgaatgaggctgaattctagctcccgctctgcctctttgtgtggccctaaacaaggttccccagcctccgtttcccagcttgtaaagtgagtcagaggtgttagattcaaaaaccttgaggagcctcccagctctggcttgttctgggttggaggccacatccccttctggccactctgggttttcccttaccctgcatcttccaacctcggcactgctgggctgtggccccccagatatcctgtcttgacaggggagggagtgacacttcttttgaatctgggagcctggaccccatagcccaccctgcagcatctaatcactcctgagccccagacctgccaccttagccagaggagctggcaccctgccgaggagttgttatggttccagagagctcaatactcctgcctgactgttccctaatccctcccatgccttccatacagaaccagagacccccagaacccagaactcctctctgctcccagaccatgagctccaagggcctctccaggtgaaccccattgccaggccaaagggttggggctgatggctgcaagggagggaggacggtcctaatcggtaacacatcaaagggaaagggctgacctggacactaaactcccgggttccagcccctgcacttccaccttgatgtgtgatctggtggtggtggggggcagggggtccctttggtgctgtggcctcagtttccctattagtgcactgaggaggaaggagatacactgttcccaggtccagtcagtgctggtacctagctacgcagtttcttccagtgtagacgccgcttggtttctcattcctctggtcatttttgtatcagttgaggtgggcaggggtgggggatcacgacggcggttatgggcagaggagggagtacagatgcaggagctctcagggacagaaggctgcccaggcagcaatgagactgccatacccagggcagcacgaagcccaggagttggctgcaagtacccagctggtctctgcagggagacacagagaaggtcacctgtgaagacctccacacgtgcaggaactgttgaaatagacatccatggcagccaaggagtcttttgaggggctcatgggggaaacccagggagctctggaggctctggtgcaggatgtctgagtggggctggatttaatggtgttggccccaccacaactagagttggaactgttgaggccacaggatgccaggccatgctcaagcggaagacagagaccacacccagggtcagggtcagggtcagggttcagcctgggctggagagcagagggcagggaagcagaccctcaagggatactcagaagcccatggcctggtcccagacacagagcactggctgggctgggctgggctggaccagagccctgggagagagagaaagcatggcttcacctctcactgccttgagccaaggaaacacacaaaggccttggtcagggaggaatggaaaggaggttagcagttggcaaatcagaactaaacagggtcccagcagcctgtgaggtggatcctgtggcttaggaatgcagatgctctggaagagggcagatgggagggaggctgcagagatatacgaggtcctgtagggtgtgtggagaggcagaagatggggaaagacgggagagtctgggatcccgaaaaaagggagaagaaaaaaaggaagtggccgggtgcggtggctcacacctgtaatcccagcactttgggaggccaaggcaggcagatcacttgaggtaaggagttcaagaccagcctggccaacatggtgaaaccctgtctctactaaaaataaaaaaaaaaattagccaggtatggtggtgcctgcctgtaatcccagcactttgggaggccaagacgggcagatcacttgaggtcaggagtttgagaccagcctggccagcatagtgaaaccctgtctctactaaaactacaaaaaaaaaaattggtcagacgtggtggcacatgcctgtaatcccagctacttgggaggctgaggcaggagaattgcttgaacccaggaggcagaggttgtagtgagccaagatcgctccgttgcaccgccacctgggctacaaagcgagactccatctcaaaaaaaaaaggaaaaaaaaagaaaaaaaaaaaaggagatgatgagaaagaaaacacagggccaccaacatgggaggagtgagaagtggggccgatttcacggcagaacaagccgtgagatgggagggagaggacagagacaatggaggggccagggagacagccgtcagcatgagaagcactgcagctgctctcagggacggcaggtgagcagggcccgaagggatagagctgaccctcgcgccacccacagatgcctctgtcgtcagctgggaacgcagagccctgatgaactgcagaaatgttttaaatgaaagtcttccaagcatcaaaatattgaagctgttgttgtctcactgtgggttagttgctatggagaaattcagccccagcagccactctaattagacgcccatgggagacaggccccaaatgggctggtttagggctggcctcagggaaggggttccccgcccagagccaagaatgggggacagctccccacctcccagccacatgtcctaaaaatcacccaaactgagtcttctccactgttggaggcatagagctggtagggaaactgaggcccagagaaagtgaaagccccgccaaggtcacagaactagtcgatggcatggctgagaccacatcccaagtgtcccgctctgggtattgacgtcttcccagcacgtagtctgtttctcttccaagaccccgtttgccaagcatttcaaagccagctccgtctcaggagtaagtcaacaccctaaatatggtgacttcccagagtggggccacgcaggccaagcaagagccagggactgtcctgggctgtggatcaggaccctggtgcttctccccaactcctctgcagcccagcagagcatggctagggagggtcttctctgctcaattccagaccgattctaccttcccatgcctgtacacctgcctgggtactcgtgcctctgagccttcaaggctgatctctgcctgaaatgtccacccctttggatgcccctttctttcaatcccaacgtcaacaatgctccttcctatgtctcatgggttggccgggaagagatgcagaggtcatttccccaccctccttgtccctcacctgaacactggcaacagtctttctaacactctggcactccctgcatctatgaggctcatttattttttctttcttttttttttttttttttctgagacagagtatcgctctgtctgcagtgccatctcggctcactgcaacctctgcctcccgggtccaagcgattctcccgcctcagcttccccagtagctgggattacaggcacccgccaccacacccggctaatgttttgtatttttagtagagatggggtttcacaggaccacctgttaaagggaacacatctgttaagggaatacacatgttggccaggctggtctcaaactcctgacctcaggtgatccacccaccttggcctcccaaagtgctgggattacaggtgtgagccaccacgcctggcctgactgttctctcttacaacagctggcacttttacttagcagcggcacttttacttagtggcgatggtccccattcgtcattgtattttcttggatgtctgcctctcctgcaaggctataagtatgatgagagcagcaatgtgacgactgattgccacaggatccctggcacctagcagagttcccggcacatgtgaggggttcagcaaatatttcaaacagtgaacagacgaaggctgagcccctgctcttggcacatccacaggatgggtaagtatggagtgtggagctgcagataccacgtctgagtggggagggatgcggacccccaaatgggatcttcttcttgaggcttctaggaaggtcacccagccagtgatatgagactggggttcactcacctctggcatcaaagaattcatcatctgagctctccacagagtcactgaggacatttcgaaggtgccagggggcaccgccgcccgggggaggaccacctgttaaagggaacacatctgttaaccaagcctgagatgttgtcccagtatgagggaggtgacccaagacccccctggactaaaggccagttagcatcctgcacatctgtgccctctccctccgaggcctcagacctcacagagccctccctctcctgtgctgtcattgaagctcaaaaacctctctgagtaagtgcagcagagcaggaatgcgtgtgcccattttccatgtcctaacactgaggctggtggtagttatgagcctttgccaaggtgactttgccaagcagcgtctcagtcagcacaggggaagctctgctgtattaacaaatgagctcagacgtttaaacatcaatggttcatttctcactcacatacaggttggaagggagctctgctcattgctgtcactcataagtgccaccaccttacgatgtcaccagcccaaaaggagacatcaagttctggccaagcaggggagaagagctcagaaaatctcacctagtcttaaatgcttctgcccagaaatcacacacttctgctcgcatttcactggccctgactaccaggcacacacgtcctgtccctcagagacctgcattcttgtatcagcaatgcccctgcctcagtttttccatctgtacaatgagaatcctggcagagactgtcctttgaaactcttctactctgactgatattggaggagcccacctggcccacagtaactgacaataaacaagcatggggcggggggtggacatcctccctagccactgccaggtgagcctgatggtgcagtccttcgagatacctgctacagtcccagttcaccacaccccctaccctgcaggatgctggcactgttccctgccctgagtccagatcccagagcataaactgttcctgaagggagacggtcagcccaggccatccagggacacagccctcctgcctgtcgttcctgcctggcccaccacaaactcccaaacacacacccagtttgtgcttcatggcttggagcccagtaagaagcacattctgagacatcaaaaggacagagggtacagtgaacaccaactcggtagtcacctctaggtacaaggctgattccctaagcttctgatcccctgtctctaccagtgtgagctgacgttccaccctcgggccctggatttactgcaaggggggtctgagagttcagatgcaccataactgtgtgttcctaacacagatatgggacgattttccaaatgtatgtggaggacattctagctattgcaataagacaagaaaaaagaaatgattggaaaggaagaaataaaattgtcttcattcccagatgacataattgtctatgcagaaaacaaaaagtctacaaaatctatattaaaaaaactaccagaactaacaactgagtatagcaggattgcaggatacaagatcgacatgcaaaagtcaattgcattcctagatacaagaaatgaactgaaatttgaaaatgataacgccctttaaaatagcgcacacaaaatacttaggcataaagcaaatgtatataaaaatttctgtgattcaaaaactacaatcacttaaaattattcctgaattatatcaactgtatgttttctcaatcaacagatactaaaggtataaaatctatcatatctactacatttgcatactatgtgaatacgctagattaatatacagacatcccttgctatcccagtcttttccgttcctaagaagtaagaatttggatagtcagcaaagtcctattatccccatctgttcagctcctgagttttagatagtaagaagcaagagtttaagtagcaacaaagtcagctgaggatttatctggatccatttggctcctgagtttgaacagcaagagcccagtgagaggctcctctatgcggtggcctcatacatgcacggtttagatccatccgagaacaaaggcagaggcattctctctgatgacctgtgcaggggtcccagcaggaggtctggggcagagggaaaggctgcagggaggccagtcagctccatttgagggagcaagttctcccagctacaggtgagcagaaaaggaaggggctggtaggcatcaaaggggcctctcattccacagacactgtgttgggaactgggaacactgtggggaatggacaggattgggtgctcgcaaagcttacattctgcaggcggggaaggaaaagccagcctcagtcaaataaacaacccagataatttcagcccaaaacctctcccttcctacactatgtcctccttcctcaagtgtctcttatgtgataattacagcctaaagaacagacagacttgaatgtgtggatctgtacttccgtggggagaaaatggttggggaaactcagcctcagacatcaaaagaactttgtcacctattgtagttataaatgctgaactaacatgatgtctcccttttattattgcggctctcttttgtggttaaaatatatattcttttcaaatgcatattttatcttgtttactattattctacttgctttcaaaatgtatacctgccttggtgttttgttttgtttttgaaacagagttttgctcttgtcgcccaggctggagtgcaatggtgcgatcttggctcactgcaaccttcacctcccgggttcaagagattctcctgcctcagcctcccaagtagctgggattacaggtgcctgccaccatgcccggctaatttttgtatttttagtagagacggggtttcaccatgttggctaggctagtctcgaactcctgacctcaggtgatctgcccgcctcagcttcccaaagtgctgggattacaggcgtgagccactgcatctggccccgccttggtttttaaatgtatactggataccaggtcttccctcccctccagcaggggctgcccaacaaacttctggaaaggtgttggggtgcagggaacctcagttatatacctgcaaaaacagatatgttaagatggaacatgggaactcttccctgcatctcttcctccagcatgcagattttttggcaaacaacaaaggtcgtatttccaacaaggagaaaagcaatgggcagtgtctcaggaggggttagaggggaagacctttgtggaaaggtgtcaggcaagcagaggcctgaataataagaaaacccagatatgctaagagtgtgtgtgtgtgtgtgtgtgtgtgtgtgtatgcacatctgcttgtgcacatacatgtgtgggatggaccgggcaaaatccatggataagagccttcctggatgaaagaactgcaagggtaaattcccgtatgagcttggtgtgtccaaggggcagaaagaaatccatgtggctggggccaatgattgaagggggacaggaataggggaaatggagcctgaccaggtagggtaggacctgtcatggacggaagcttggaacaggtgagttttaaggctcctcccactgccaagcctctatcacctgcaaacttcaagaggaggggaatacagatgctgaagagtgtcagaaagtctcctgggggaggggaccacaagtcagatgtgctagaggccacctaggttcctgagagtcacagcaggtgggcatgacgaccccagaacagcaagggaaaggctcagaagcagtgtccttgaggtgggtccttgccctacacttccctgcattttctgggtccaacacaaagtcccacacagaagagggccaggaagtgtttgacaaacaagtaaatgaataaaaatgatttgcttggtgagtgcggcatgccaggcagtctgctagctgcttttcagacattagctaaagtcatcctaaccaagcctagcaaagtagacatactgaatccccaccttacagctaagaaaacagagcctcagggatgtttcaggaaggcgtttgctctgcggaagagatcagggcgggggacctcagtctcctcctctctccattgcccgctctcttggaaatagcaacccttctacctgtttctggccagctgggcaaggggccagaggcctgcccctggctcctcatgggggccctagccctggggggctcagctgtcccagttctagaaccatctgcccatcaggtctacaaatcagtgtctgggtatccttgtgtctgtgggaaaaatctaaatggatgtctacattcctgcgtagaggtgtctagtgttacacgagcatctgtccctgtgtctgcttggctgttgtgtgtgtgtctacattccttggggagtgtgagcttacccacttgccagcccccttcctaatattgttcctaagaatcatgcatgcatgcacactcccataattctctccctctctccctcacacacaaagtaaatcagctccagccatgggtgaaaatttagcagaggttagaacacgggctttggaacaacacaaatctgggtgcagtgttaccagtggctaatctaggacctgaagcaagttaacttcactgagcctcacttttctcatccggaaaatgagcatcataatacttaccccactgttaggagatttaaatgacatcagcccccagagcgtctagcccactgcctggcacttggaaatggtggccttgtcagcgacaggaccaaggattgaggcagggtaagcccacctgaggggcttccaggcagctgccaggggccctccccaaggcctcagagctctatctgtgtcctccaaggcccagcccacctcctcctgaagaccctccttccatccaccttcactaccacatttatttatttttattttttgttttttaattgagacagggtcttgccatgttgcccaggctggtctcagactcctgagctcaagcgatctgctcacctcagtctcccaaagtgctgggattacaggcgtgagccaccacacccagacctacatttatttaaaatgttaagtcaggatgaaagagaaggggaatatcccaactcttcttctagcaatttagagagaaacaaatgacccttcaccccagcaatgccagcacagctccgagctgggccgctcagtgggaggggctgctggaagccatccccactccctctcctggccccgatacccaccacctcaggtccagggtggtctcctggaccttgtcatgggcctgggtctccctagcatgggtgcagccaaagactctgctcagatcgtcagctcctcctggccatctttcccactcagggacataggactaggtggacagagagacagacaggcagacagatggacaggcgtctcctatgtgtgttctgctctatatcagggaccccaaggcagccccagccccaggggcagagtcctcaggcgaagggagatgcctcccccatgctcaggagccctgtctgaggggaagacatttcacagtgaggaacgccctgaccgtaagatgcagaacaaaggtattggccgatgcttactgggccagaccttgggccagatggtgccaggaaggaaggagtagggggcagagctgaactggaacagtccctgccctcagaaatgccagccctgggggcacagccctacactgcttcctgcacagagcacaggaggaacagaggagcagacgtcctggcccgtgtgaaattccacacccaccatgtctgtcccgcggcaagtggaaatggtcctcccagaagcagggactggctagggtacccagagggtttccgggggaggggaagccaagatgagcctccaaggaaggggtgggcagggttggccaggctggggcaggtgggaggaagggagagacacaggccaaaacaatcgagccctttccaaggaaagctggatctagaactttctcctcaagggtaaggagcatcggggcaaaggagggcacatgggtgtctgctggcagctgtgactccagggacattcagataacacgtgcaatttccagacctccagggaggaacaggtgcccctgagcgaggccctggtgggtgcacagcattgggctggcacctgcacctactggcctgtggccacagcttctaggcccagccctgcctacggctatatcagaaactgcagcctgccaatgctggatggacttaagcaatctgtgcctcagaagaagaaagggaggccaggcatggtgccgcacacttgtaatcccagcactttgggaggccaaggtaggaggattgcttgagcccaggagtttgagaccagccacgtcaacaaagtgagaccccatctgtacaaaaaagtcaaagtaaaaaaacaagcctggcagggtagcatgtgcctatagtcccaggtactcaggaggctgaggtgggaggatcacttgagcccagcaggttgaggctgcattgagccatgatcatgccactgccctccagcctggggaacagagtgagcctctgtctcaaaaaaaataaaaataaaataaaaaacagaaaaggagaggagccaagagtgagagcagtgcctggctgcagggctgaggctcatttgaatggtgtctctctctctctctctctctctctctctcacacacacacacacacacacacaaatacacacatacacatacacgagaacagcaggttctacaagcacaagcatcagggtctaactcctggcggctgatgcagctgaaaataatcaggccttgggatgtcccatgggcagtgggagccccgtagacacatagagcccagagcacacatgtggctcatgcagccacacacacacacacactcacacacacacacacgcacacatgcacttagaatcacacttcagtgctctcagctctgccttggggtccctggggtccaaacgcagaatgtggagtgcagtgcttcctacagcctggccgaggctcctgcggacaggcaggtgactgtcaagccccgcctcctccgtgcctcctcctccctcgaggaaaccaccatcccgctcccacctgactgcttccagccccagttctgccacttaccaattcgtgatcttactaaatgacaggaaacccttctgtgcctcagtctcctgctctgtaaaacggggaggataatcatgcttacatagtgtcgcagtgaggattacatgaacaaacatttcaaaacggtttagcagagtgcctgagactccatcagtgctataaaagggcgtgttaaataaaataataaattgtgattctccaagagcttttctttggttctttcatccgtggcaacttccaagggcagacccctctccttcttctcgggcccctggaatgggagcctcgccactccccaaaggctggaaatgcttgcccctgcccacgctcgtgaggccaatccccctctcctccctcccatcgcaggtccctggggcttgccttgtctgctccctaaacttgaactactgcaggccaggacctgctctcccatcccagcctctccttccagcagcctgggcttcagcagcacattgccaccagtagagccttcacaccacgctcctcttcctctccaggcctttcctcctgcaggtcctgatgcctgaaacgtcttctatctccccatcccacccccaattcctattgatgcttgaagcatcagctggaagtctttcttggcccctgaggccagcccgggtgcctgtctccttgtgggtccttcatgtgcagcacctgtgtccctcagagtccctatttacagactgggtccaggcctgcctgccccattgggctgtgggttccccctgagcagacacctggtaggaatcctctccaggctcctatcctgtgccaggtcagggctgggcacacagaaggctcttgtcaggctcagtgtggcccagcagaggggagatcttagcaaggccccctctcaggggagcatccccgagggaatgtcctcaggcttcctctctggatcagggtgaatttggagaccagaccagtccagggccagccagcctatcctcagccttgaaggggggctgtccagggagagatgagaggccaggagaagctgcttccagaaaaaggcattattgaaggaaaccagtactggttgggggttggttgctatagaaacatgtcctaactatctcccaaactgctatatgtgccaccgatgagctcatgtgctcgtctgtttcaggggacacgccaggagccctggaagggcctatctgcccgagtacgctgcatctgaagccaacatcctggagaaccccggaagaaatccagcttccagggcaaccagaggggatcatccatccatcggtaatgcacttaaagactgaggctgacttcagattgcagaactgtcctgagaacagctcaggtctgagactagccgtggcccaaacctcaacctcaaccatggcctcaactttcagtttggccatagaccgagttacaaccatggccacaggccaggccacaactcctgtctcaaaccacaccacgaacctgaccacagacccagcttgactcagtcacagagcaacaacactgctagccaaagactaagccctgaccctggccacacaatggcacccagcacaatcaagggcttgtatcaaataacttgaaggatatgttcactctaaagtctgtacagggcagctgtggtggctcacgcccgtaatcccagcactttgggaggcggaggcaggtggatcacctgaaatcaggagttgcagaccaagctggccaacagggcgaaaccccatctctactaaaaaatacaaaaattagccaggcatggtggcacatgcctgtaatcccagctactcgggaggctgaggcagggagaactgcttgaacccgggaggtggatgttgcagtgagctgagatcgtgccattgcactccagcctgggtgacagagcaagactccgtctcaaaaaaaaaaaagaaaaaagtctgtacagcattgcatccggttgcctgggatttccacagcctctgctgcctgtcgtcttcacgatagcccagggaggtcagtaagaaaggactcacgattcttgttgacagatgagaaaactgaagctcagaggagaaaactgatgtgcctcctgtcatgccgcctgtttctaggggtaaggggagtctccaagcagggcacagttggccaaaccagttgctttggggaaaatgtgctttttgaagacctgctggtatgtcataaatatgccatttaaatacccattaattaccttatttaggagataattagtgattaatagctttggctatctattgtactttcatttgctctgccaattaggctcccaacagttctgaattatttggaacaattctcccaaggcccagctgtcccccctatgtcccgccagactcttgttccataaggaggaggctctctcctccctctaaaacgagttccccgtagcacctgccactgtgccacaacaggctctgccacctgcaggctccccaggagggcagcccgaaagacaggacagcaggaggcattccttctgctcatggcaggacccccttgcagagagctgagaataggggctcaaggtccaggcacctacccaggcaacgggaggccaggttggaatcagactcctcaaaggacgctggggtctcttttcttttcttttcttttctttttttttttgacagagtttcactcttgttgcctaggctggagtgcaatgccacgatctcggctcactgcaacctccgcctcccaggttctctcctgcctcagcctcccaagtagctgggattacaggcatgcaccaccatgcctggctaattttgtatttttagtagagacggggtttctccatgttggtcaggctggtctcaaactcccaacctcaggtgatccacctgcctcggcctcccaaagtgctgggattacaggcgtgagccaccacgcctggctggggtctctttcaaagaccaccacctcaatgaaacgaccagctttttgggaagtgcatcaaaggctgccattagcctggagcaaacagtaggagggtagcagctccccaccccactccatgccagcaagagccaatgtgaccccctgcaggtgatccgactcataccacctgccactgctggactgcaactgagcaaagatgggacccaaggttgcctctgcccccaggcccctccatttggtgccaaagcacagtgccaggaattgccagccaaagccccagaggcggagctctcatcactgctccagattatactatataagaaggaaacacagaggctgcgaggggtaaacacacacacacacccgaactgggcagtaatgggaaagctgaaaatagctctttttaccacaagggatgactctagagttgctcggctgggactagcctcacggggggcaggaagtaggagcaaggggaagagaaggaacccacaggggcgacatcagggccaaaaggagttctgttgagggtagtaatctggatcaacccagaacaatcagaaaaggtcaatggtgcatgagtgacgggcagccacagacactcagactctctgaaagacagactctagaacaagtgaaagccttccagctgtcagccccgagagctcacagtcccacatcctgcacacctaggtctctccccaaggagggcaggagtgcaggacgtgacgtgctctgcaaatacccagagccaggcaaacacggtgtcagcagcagacagctcagaagaggcctctcagatccaccagaactcaacgcccctcccagacagagcccaacgcgtttctatttttgctttcaacccttgtttggcatccctgctaccagctaacagacggttacttcccctccttccagaagaatgggtcatctgggaagaggaacacctcctctctggcctcccatgtcccaggtcttgtaataaacaggctgaccctcccaaagagagatgaggctcccaacacccccaggaaccttcccctggtaggtggttcactccaagctgtcctgctcaccagccctggagaagagcttctccaggacacctagagagagcagcttcacaaaacctgagactcctgctttccagaggcagatgcaaccccccgcagccccttgccagccctggccacacggactacaccccatggagccccaaattcactcacactgtgccaactccagccacagactgaaccccaacatgccacactctgcaccccatctctagcctcaaatcaagcactgacagtgaccacacaggcttccagcctggcccaatctgagctgtggccccatgaacgtgtgagcctcacaaatccagccctaggagagcctggaggaagcaggttggctgtgtggggccccagtgctgggacccagctcccaccccagagtcatggacagaggaggcttctgccccctgtctacccttgccacacacgcaccctgtgggggctggtggccacacagctgtgcaggcctccacaggcacacgtgggaccctggaggtggcatttacctccggagtgactcactaagcctcctattccatttgcaaaagggggtgcaatttagcattttctttctctttagaaaacaggaattttaaaagagagagagtggagagagatttgagggagtgggtggggagctcagatctcatttgatttccaaactcatttgttatgcattctctcctcccccctcccacaccgagcccttcccctggggaccctggccacccccttccgggctcctggctgcagacctggtgatggcctgccaggaggcacgtgctctccacgtccacgtcctcagctccccatggaatgactgaccctcaagtctgggaggatcaatgcaaggtcagagttgagagggggcaaggcctcttcaggacacagtaaaacccacagccagggaggctctctccaaaaaggagagagcagtgttggagctggaaagagcctgaagctcatcctgaccctcaaactcttccctttcacttttacagataaggaaactgaggcccaaagagggcagttcaaggtcaaccagtgccaaagccagggctctccttcgttagacaagttagctcccaggaatattgactccaacagtagaagagacataagctctaatcccagctttgcctctaactttatgtgtgattctagccctagatatttaaccctactgggcctcagtgtctcattcataaaatgggaataacattggctctacctcagagatgctgttgagccattggacagaaaagcatgctgagagctgctataggatctgagccaaatgggtcccagcatgcgaactcccgatcctaggatctcagaattcctggaaggcagctgggtcctaccaggaagtccccagtccctaaagcctccatggtctctgaaagttcacactctgtccttgaaaggggaaaggatgccggatctcaaagagggacccttgactgaaagggtctggtctctgtctcccaacctgcttaacaggtagaacaggagaaccaggccacctccagccatgaagtctcataacatatgaagatgtatgtgagaaaacatcacagcttctggccaatctgacccagacatggcccaggcaagtggctggggcagggacactgtccagccatgtcctcgtattctgtgtcctgccacactggacttccaaacacaggtcaagtcacagaggcctcaaatgggggataaggggttccaggcccagggtcacaggcttgaggtggaacctctctgtttgagctgcaccatccttggctcaaacaaggacaccacagccagaactgagcggcaacaaacgtctcaggctgggacctgccaggtctgctgctgggataggtgatttcacagaggtcggcgtatttgcataggaacgtgaggccatccaagttccagcacaccccagactgcgggaaagcttttgaaaagcctggagtctggccaggcacggtggctcacacctgtaatcccagcactttgggaggccaaggcaggcggatcacgaggtcaggagattgagaccatcctggctaacacggtgaaaccccgtgtctactaaaaatacaaaaaattagccgggcatggtggcagtcacctgtagtcccagctactcaggaggctgaggcgggagaatggcgtgaacccgggaggtggagcttgccgtgagctgagctgagatcgcgccactgcactccagcttcggcgacagagcgagactccatctcaaaaaaaaaaaagaaaagcctggagtctggacactggtgtctgatttgaccatatttgaccataaccttcccattggggaccaaagaaagtgagtttaccatctccttgcaggatgcaatgcccgtcccaagatacacagtagagtaatcggtgccctagggctgggagtttctcagagtcatgcctcaaatcctctggcacctccccaaagatttaagaatcccagcgttgtccaggtatgatggctcatgcctgtaattccagtactttgggaagccaaagcaggaaggattacttgaggcccagagtttgagaccagcctgggcaacgtaatgagacccccatcgttatgaaaaaaaaagtattaaaaaaatttttttttttttaatctgcgctagtcccctttccaagcttccagatgtttcctcctctgagtgatccagccactagtcactgcccctgggagccacagagtaaggggcccaggagaagtctcgctttgggaggatgtgagagcacacgccccactccaggaggaccccaaaggaggctgactcagcagagcaaggtccaaactctggaaacccaggctctgccgtcaccttcttctgtgacgttggccaaatacctacctctcacgggccctcagcgacccattgttaacgaggacttggaacatgagtatcgaaatgttccctcccatcctaacaccgtaggatcagtactttactgactcaaattactaggtttgccacatggaagcctgccagctacacccctcagagcagaggctaacacctgagaggagaataaactggttcctccagcctgggaggcccaaccctgtggcctcggctctgtctctgcagatattcctgccccagcctgagaggtgccaagaccctctaggctgttcactctgctcctgcctaacctggggacctggcccccaccccctaccctcattctctcagtgggagagaggggcagcctgttggggtgcagagggaggggcacagggaggtagacaggaagggaggggcagtgtggctggcaggagtcagaatcaacccttcccaacaaaggcagctccaccaggctggcctctctccagcttcccaggagccctggcgtcccagccagagggatctgtcgaaacacagtgccaagtcttaccccggcactcctgtcttcatgctctttggagttccttttagccctctgcattcttccgctccagccaggtttctttacttttgggcacttcctacccaccttccacccctacccatagcagtcctcccacacttacacatgtgcctcttcctttccatcctcctagcctttgttcaagccactacccccacctggaagccggcccctggccacctttctttttcttttttttttttttttttttttgagacggagtctcgctctgtagcccaggctggagtgcaacggcacgatctcggctcactgcaagctctgactcctgggttcatgccattctctcgcctcagcctctcaagaagctgggactacaggcgcccaccatcacgcctggctaattttgtttttgtatttttagtagagacggggtttcaccgtgttagccaggatggtctcgatctcctgacctcgtgatctgcccgcctcggcgtcccaaagtgctgggattacaggcacgaaccaccgcaccgagcccctggccacctttctatacaaactgtgccagcctttagggcccatctcccagagaaacccagccttcactgtctgtctcaagccactcactggcctctctgctccgtggggagctctgtactgtaaattgtccctcctactcagagcttctgaatcctccccacccctgcccccacctccctgttgctggttagactggggccaccataaatgatgcctttctgtgtaactgaaatctcccctagagattgagaactggtaataacccatctggattcaccttctgaagatctatctcatcctctctgggccccgataacaatttctcttgtacctggattctcctggcagtgtaagagtcctttcactgcctccttttagctcttgtccgacacaagccatgccacaaatctggcacagccatgacctgctgctcaggctgtgcactgcacaactccaggggtattattcactagaccacacgtgatgacctaaagtcaggtaccatggcagccctggggcccaaagctctgccttttctctccgtgggtgatctactggccagattttaaagggaacatctcacaggtcatggtgcagacccctcattcacaggccgggtgccacagcctccactcctggccttcagcagccctttgttcctgtgtcaccccccgccgccccaccccgccagagtgaaggcctgatcattcctgcccatcagtctgcccatccgaggcaggtggtactgaacagccaccccgctctctatgttctccttgggcctcagtttccccagctgtgaagaaagagatgggttcctgatctccaagggctccctctgttctgaagctcaccaatctattcttcacagatgttgccaatgaggaatatgtgattctcatacacacattactgtgtgttgtttttgattcagtaggcttatgagcatcaagaagagaagggagaccaggcgcagtgcctcacacctgtaatcccatcactttgggaggctgaggcaggcagatcatttgaggtcaggagttcaaaaccagcctggccaacatgatgaaaccttcgtctctactaaaaatacaaaaattagctggatgtggtggtatgtatctgtagtcccagttacttgggaggctgaggcaggagaatcgcctcagcccaggaggcggaggttgcagtgagccgagatcaagccatgccctccagcctgggagacagaccgagactccatctcaaaaaaaaaaaaaaaaaaaaaggagagaagggacatttacaaaatgcagaggagcctgggagagctgagctgagaagggagaggtaaccagactccttgggatgactgctgagtgtggggggcaggagcccaggcactggatctacagacacggggaatctgtgttgcctcgagggaaagggccaagcgtgaaattgcagcagaaaaaaaccaaaatgttagaacagcacaaggcattgatgctcagagcagggcagtttttccacctgtcactggaacaaattcccacagactctcagcccagggaccaaaggacccacaggctaaggcagagggactgagactggcacccccatttggtaagggggtgacctatcagggcagtgacagagagagtccttcgagtccaatagacctggctgtgagtccaggctctgcccagaccctctaagccaccttgaggctgctatttctctgagtatctgtttctagatgttttaaaagtgggagagtcgcatttcctccctcccaggatcacggtacagtaaagagcttagcactctgcctaatacatagaacaagcagcaaatgttcactgccgttgcgatgacagtgccctggcaggtgacctgtgctcaaggcgtcccagtgcacacacacactcacacacacacagggtagggcagcagatgggacacacgccctgccacaggccattttaaggagtcggggtgggtgaggacccaggcacggtggaggaaagagggaggcaagaagcctttttcagcttccttggtgtcatctcacagtgcctccctcaggaggggaaaagggaggggagtgagaaggctgtttagctgtgttccatactggctgtgcctcacacaaccggccccaccccgacaggactccttggggacagaacgggagtgcattctcaggcacctaaatcttacaggctcagtgcctgcacagggagacgggtccgcagcccagggtcccgggcagctttcgggcttgggggtggattgacacacagcccgatggtattcacacccattccttcactgtcgcgcccggtcctgggggacggcatggcaccagccaacgtcacgggttgggtgtgagttcatggtagattctcacacgccagcctcacaagaggcactgccgagaccaggcttgctgccgcctactgtatggccggccctgtgggcacagctgtcctccacccgcctcccaaggcaccatcgggcccagaatgtgcccgatgagtcacgggcctgggtctccccagcatgggcgcagcaggggggctgagtccgcctgagccccggtgcccagctcagggtctggcacagagcagatgctagtgaatgaacgtcgggctggatgaatgaacgaatgactaatgcccgctccctcaaaccacaggctacaccgtctgagcctgggggagggcagagcccacgggaccccagaagaggcctccgcagctgaggctttgcgtcccagggtcgatgggggagggggcggggcggccagcagccggcgcggcacggggctcccctccttcccgagaaggaatctgggtctctggactgagctggtgacgggggctggggcggggggttgtggcgtcctggatggagagagctgcaggagcagggggcgcgtcccggtttgcgttggggtgtgggacgaagcggcggccgcgggacatccccttcggtggcgaagcccgggtctgcccggggcctccgcggggtgcagagggctcccaacggcgggactggcccggggcgccgcagacctggccctttccggcggggccgtggagaaggggacgcggtgtcccccgaggtgaccgggggcgcaggaaggacggggggcgcgcggagccccctctccacgcgcgggaggtccagccccgctaccgccccctacgccctcccgggacctccgcccacctgcgcgaggggttcacctgggccggcggcccctcctctagacgcgcgagtccctcccccgggccccggccctgccctccccgcgcccgccctcacctgcacggcccgccttggccatgtcccgggcggcgggctccggcggcgctacgcgcgctcctcgcgcttcccgggcccggccccgaccgcctccggccccgaacggactccgagcgccgcgcccgcgcccccgccccgctcgcctcggctgccgccaccgcagccgccgccgcctcgccgctccctcccgctcccttaaaggcgccgagcggcggccgcgccccccccccaccccaccccccgcgccgccggggagggactgacgaaggaaggcgcccaacgccgcccccgcgggcccgcacccccgccccgggccgtggccgccgcgctccagcccgctccgctccggcccgcgcggccaccgcagcgcgcgaggggcggcagcccaggggctcagagacgcggagacagcccgagacactgcgggccagagacggggccctggactgggagaggggcgcacagactattagacagcgctggagagagacgctcctagggccagaacgccgaggtggagggagagagagagaaattcagaggagaccagagacccagagcccggctccggctccgggagagacggacagagggagcggagagaggaaggaggacagggatccaagggaggcccccacgaagtcaagaggaaagtcgctctgggatcagagacaagagagggaccccctccatcagcccccgctccaggggttctggatcatttatggcgtctgacctaacctcaaaagagaaaggattcccgtgattttaaccctcaagggataagtaaaacacttgcacatccacctggggttctaggctggagcaggctttgtggaccccagcggcctggtggtgagcagtacccgccttccacttcctaaatcgggatgcagagattctagtggacaggccttgtggtccggggagatatgggttatgacttctgtttaggggcagcagggatccacagtccagccccaaaagagagcaggagatggccaattgtatttggcggtgcctgagaggtaacaaccctccactgagagggtgccctgcctcccccaggaattggtaaggctgaagcccagttaccatctgtagagccaggcacccaacccaccctgtcccactccacttaacagggaaaaggtcaactggagaattccatccatggtccaggctccagggtcctgcaagctcctctatggaaacagggcacacatggggttagatgggggctctcagtccagtgccttctctggggctttgactccattcacaagattcctgctaagcagtcctccagctcctggttggttacctccaaggacaggaagctcagtatcttaagtgagagttcttccttttattaattttttttttttttttttggctagtgctggccttaagaatgttcttactcgtttgagctgaaatctacaacccgcatgtcccatccatgagttctgctctgccttccgacacctcacccaacaaaaccagggcttcccaaggccttctacccaaactccctagtatggattcacccagggagaacaaccatccacgtttgccagagctcacctcccaggaaacccatgagtcccaagagctctggatcccagagccagatgacagcaccaactccaacagatgtagaatttcagaagctctgggctcctgaatccaacgctgttcaccagcacctgccattggtcaccagctgggagagcaggaatggaccctgcagcctttccccactatgagaatgggactggggatgagaataacaaggactattgattgaacaggcggtatttaccctcatgtactctctcagctacattgcgttatcctcagcatacacataacgaagtgggggctaagaaagttcggtgcttgtggtcatggaggatcaatttcaggcccctgtgctttgtctactgggcctcactggcctcacccttccctgaggtgtttcagaggcctgatagcctggacaatgtccaggcttggccacctggtctgtaggtgtgagtggtcacgcaggagacagaacgctggctgcagaagaagcaatgcgcctgccacagaggggacacgcctgggcctgagctcctccccagccctggctcacagtagcagcagtgaccagagggcatcaagggccctcctgcttctgggcacagcttcacgttgtgtttgtgtgtgtgcctgggtatgtgtgcatggggtgtatgtgtgtgtgcttgtgtgtgcttagggatgcatgcatgggtgtgtgtaggcacactcgtacacacaaacacaggcaaacacctgctgacagatgctccctgggtgggcacccagaccccttcccctcccaccacttagtcctcacaaaccctaaactagtcacccagaagggcctgggtggagcggttaaggggaggtgccaagttgatgggagtttcagaactcatctctccagaccactccacaccccatttctcagatgggaagacagtaagccagatctgtcccctgaaaaccacgactcagaggcccagatccatggttcccctctttaaaccttcaccccagcctctgtccgcccctaaggcagcccctgaaggcactgactgttaccagctgccaaggaagttccagcccagccttctgacagagcaaacacatcaaaactcaaggccattagattaactggtgggagttaacttcctgcgtcagaagaattgtccttaattgaagaaagggataactagcaatttagccacgctgacctctgctgcccggaggaaagagaggcaggagccagccagggcctacggggcctcccagttaccagagttactgtgccagtaactctcccagttaccagagttactgtgccaggagaccagatcaaatcccttctctgagacctggcacccaggccctttcctctgaccacagcttgttctgctcctgccttcacagtggccagctgctcccaggcccaggcaagcatctagcccagagaaccagtaaaaatgagcaggggcccatcctgtcaatggctgtggaggacgtgtgcagagatgtggacaggttggagagctccaggtgggtaaggagtgggagctggctgcaagacaactcctcgacatggcagaccccaggcctggctatccagcctggacagctggtgtgagcacttggaaagctaagtgacagttcctaggagccaacatggcccccctgaaagctagtcatgccaggcaaagctcatttcctatttggacacggttataacgactagtggagttgggcatcgccttgccttctgggcctgggttggggcacggctgctgcccagctctctgacagtaactttgtaaacaacaaagggagtcaggagcaagaagatagcctggtcaagtggcttaccccggtccactccctgatgggctccagtggagggagcctccacctccctccaggacttgagccatgtcaagcatctcagcgcaagtgctcacaacagagaataagctgtgtaagaaggacgctgctcatgcagactggacagatgcacggctgttcaccatggccttgacaagctgggaccacgggccaaacccaatcaccatggccttgacaaactggaaccatgggccaaagccaagaggatgacatgaacatggacaagcaagtggggccatcctcccaggccaaacacaaacatccagctaggagtgttcactcccacttgtaaatttccacagccccttttgtccttgagtctcactccctggccaatatcacatcactatgtctcacctggaccactggaagcaccccttcctgatgtatttcccagcctatgtacccttcttcaccccctcctttctggttcctatgctttaaagtgtcatggttgctgtccactgccatgggaaccacccctaatcataaaagtagtcccagacacagttgctcttccttggagtcttacagaattgttctgagagtagctggtttcttgtcaccgtctcctccttgccccaggatgcccccaattccacccagcatccagaacactgagtggaacatgcccttccatccagaactactcttctcctcgtcctcctcctcctcttccttctcctcctcttcctcctcctcttcctcctcctcctcttcctcctcctcattctcttccttctccttctcctcttcctcctccttctcctcttcctcgtagtcctcctcctcctcctcctcccctcctcctcttcctcctcctctcattatcctccttctcattctctctcttctcctcctcttcctcctcctccttctcctcctccttctcattgtcctccttctcctcctcttcctcctcctttctcattctcctccttctcctcctcttcctcctccttgtcttcttcctcttcttcttcctcctcctcccctccttttcctcctcctctttcttctcctcttcctcctcctccgcccctcctcttcctccttctcatcctccttctctcctcttcctccttttcctcctcctcccctcttcctcctcttcctcctcccctcttcttcctccttctcttcattctcccctcctcctcctcttcctcctccttctcccttcctcttcctccttctcctcttcattctcccctcctcctcctcttcctcctccttctcccttcctcttcctccttctccttctcccccctccttccctcctcttcctccttctcctcctcctccccccttcctcctcttcctcctcccctccccctcctcttcctcctcccctccccctcctcttcctcctcctctcccttcctcttccccttcctccttctcctcttccttctcccctcctcctcctcttcctcctccttctcccttcttctgcctcttcctccttctcttctttctcccctcctcctcctcttccttctcctcctcctccccctcttcctcctcctcctcttcctcctccttctctttgttctcccctcctcctcttcctcctccttctcccttcctcttcctccttctcctcttctttctcccctcctcctcttcctcctcctcctcctcctcttcctccttctcccctcctcctcccctcctcctcttcctcatcctcctcccctcttcctccttctcctcatcctccttccctcctcttcctccttctccctccctccttccctcctcttcctccttccctcttcctcctcttcctcttcctcctcccctccccctcctcttcctcctctcccttcctcttccccttcctcctcctcctcttcctcctcctcccttctgcctcttcctccttctcctcttctttctcccctcctcctcttcctccttctcctaccctcctcctcctcttcctcttcctcctccccttctcttccccttcctcctcctcttcccatcctcttcctcttcctccaccttttccttttccctgctggtggctgtggcttatctagtgtgtgctcttttttttttttttttttttgagatggagtcccactctgtcacccaggctggagtgcaggggcacaatcgcagctcactgcaacctccacatctggggttcaagcgattcttctgccccagcctcttgagtagctgggactagacacccagctaatgtttgtatttttagtagagacagggtttcaccatgttgggccaggttggtcttgaactcctgacctcaagtgatctgcctgcctcggcctcccaaaatgctgggattacaggtgtgagccaccgtgcccagccaatctagtgtgtgcttctaccttcgaccccaagaagggctaggacctgcctgtcttaatcccctctggtgagtccattctcagcagttacgttgacagctgtggcttcaccctcaaggcagatgctgtaaagaaggcactggccaccaccgtcttatgtgtgatttcctgcaggggcaggaagattcccttaaggttaacacgtgaccttttaggtgagccccagacccccatgtgtaaggacccccctacccaagacagaccccccacggagcagaccaagcaaaatgttctgtctttacatgagactgcattccccctttattctcaccacagtgggcggcaaaatctagaaaacatacatgtgcgtgtttccgctgtgttttcaaaacatgtctggagacatctgcagaatctgttgaactggacctcatcagattatttatttatttattttttattttttaatttgagacagagtctcgctctgtcacccaggctggagtacagtggccccatctcagctcactgcaacctccgcctctcaggttcaagcaattctccggcctcagcctcctgagtagctgagattacaggcacaagccaccatacccagctaatttttgtatttttagtagagatggggtttcaccatgttggccaggctggtctcgaactcctgacctcaagtgatctacccgcctcagcctcccaaagtgttgggattacaggcgtgagccaccacgcctggcccagctttttatttgagatgctgaaataagttgaggcccaagcctggattgcgttttctcagttgctgtttagcttgctttagccttattgaatggggtgtgctggtagatgggattttggagaggggatctggagaggctgaggggtggttgggtagaggcaaggagaaatctagcagctgccgtaaggagaggaattatgaggaaagagcttaatcaggctgcccaataggttctgctgtggagccctcctatctgcccccgaaaatgtcagcaacaatttatctcgctcacaaagctttggcagttggacctgcgttttgcgcttgtttgctgtcaagacttgagattggccccaagcaagcccagttgtcttgaagttacacttagaccaaattaaaattagaaactgggtgaaaatctaaaactctctgcaggatgggctctttgtgtctgcattcctgcaaattcccatcagcactgggtgccgaggaacaagcaaatccagaggctctgacctcagccgtgtccctcccctgccccagcctcacacacaatattgtttgttcctgacagatcccaaaactcagaaaatcaaatacagtggtagatgataaggcagacagatcaaggggggaaagctgcctgattactaacaaaacagtgttggacaagggcagaaaatcacaatcagatcatgtaaaatgatgattttaatagaaggtggccgggcactgtggctcacgcctgtaatcccagaactttgggaggccgaggtgggcggatcacgaggtcaggagctcgagaccagcctggccaacatggtgaaaccccgcctctactaaaaatacaaaaattagctgggtgtggtggcgggtgcctgtagtcccagctacttgggaggctgaggcaggagaatcgcttgaacctgggaggcggaggttgcagtgagccaagatcgtgccactgcactccagcctgggcgacagagcgagactctgtctcaaaaaaaaaaaaaaaaaatagatggtgactttctctgcatctggtttactatctccacgtcttatggtgcttgcacctttgccttggctacaggtttcctttcaggctctgctactctccgaggtcctcactctggagcccattgttttggttccagctgtggctgtgctatccaggtcccagagaaaccaacatggcagtgtcagaagatcccgtgggatcacctggatccaaaccatcttgactttgttttaacctaaggtgcacatggtaggctatcataggactggtggtacagtgctaccccacatggcatctccccccagtctgggcacagtctatcattagtccccaaaccccattctattcctctcctccaggggtctactttgaatttgcacatttcccaaactactttcattttttttcttttctttcttttctttttttttttttgagatggagtctcattctggagtacagtagcgagatctcggctcactgtaacctccgcctcccaggttcaagtgattctcctgcttcagcctcccgagtacctgggattataggcgctggccaccacgcccagctaatttttctatttttagtagagatgtgtttcaccatgttgaccaggccggtctcgaactcctgacctcaggtgatctgcccgccttggcctcccacagttttgggattacaggcgtgagccaccacacctggcctcccaatctgctttctaaagcttttccccatctgtatgtatgcatgagtgttacatactcgtatgtatgtatttcaaacattacggaatgtcaccatggggacagcatattctgcttcttactttcccctttagtattgttttttgagatgaatccacattagtatttgtagatttggcttgttccttttgactgctgcatactatttggttgtgtgatatacctcattttatttttctaatctcctctaaaggaccaattaggtctcatagttcctcgctgttacaaacggtgctgcagcaaacagcccgtgcacttcttgtgttcccatgtgagaacctctctggggctctcacacagcgttggaattgtcgggccatagggaattccacattccgcctccctaaataactcatcgccaaactgccctctcgagaggctgttctgctggtcccttcatttgaaggatggtaaaccccaagcccagagcaggaaaagtgagcactagttttagaaaccaagagtcttgaggccgagcatggtggctcgtgcctgtaatcccagcactctgggaggctgaggcagcgggcgaatcacctgaggtcaggagttcaagaccagcctagccaacatggtgaaactccacctctactaacaataaaaaaaaaaattaaaaaaattagcagggcatggatggtaggcacctgtaatccaagctactgaggaggttgaggcaggagaattgcttgaacccaggaggcagaggttgcagtgaaccaagactgcaccattgcactccagcctgggcgacaagagtaaaactcctccaaaaaaaaaaaaaaaaaaaaaaaaaaagcaagtgtcttgcaatctacctagggctcccctggccagaacactccagggcccactgcctctcctcagagtctcctgcagagccagcagggtggctgcagtctcactgagcaggaacctctgccctgggatagaaatttcatctctcggccgggtgcagtagctcacgcctgtaatcccagcactttgggaggctgagatgggcaaaacacctaaggtcaggagttcaagaccagcctgcccaacatggtgactaaaaatacaaaaattagctgggcatggtggtgggcgcctgtaatcccagctactcaggaggctgaggcaggagaatcacttgaacccgggagggagaggttgcagtgagctgagatcacgccactgcactccagcctaggcaacagagcgagactctgtctcaaaaaaaattaaaaaaaaaaaaaagaaatttcatctctctcctccagtttaagtgcagtggtgcccaccacaaccctcccagaaggcaggggagaagagtgggttgtgtgagctgtcggcatggaaaggcatcctgtgcaacaacagaaataagtgttggtgccccccaacctccaccccactatcacacattcatatgatgaaaactcctactacagcccaccctgcagagacggaatctgtgccattgacccagacctgaaagtgtaccgttgctgactcctaagagaggaccccacactgctgggagcacaggcagctgctgaataaaagctaagacagttgttgtggggagcaagcctctaagaaaaggtcattttgggcgaggcatggtggctcacgcctgtaatcccagcactttggtaggtcaagcaggcagatcacgaggtcaggagatcgagaccatcatggccaacatggtgaaaccccgtctctactaaaaatacaaaaattagccgggcgtggtggcgagcgcttgtaatcccagctacttgggaggctgaggcaggagaatcgcttgaaccccggaggcggaggttgcagtgagccaagatggcgccattgcactccagcctgggtgacagatcaaggctatgtctcaaaaaaaaaaaaaaaaaaaaaaaaaagagtcattctgttcttccctccttctccccgattccggactttgtgaaaaccttcagatctctgatggcttaaagcttgtaggggagaaaccccttcacttattaggaggccattccagttctttaactctaccagctgggaagctcttcctgttgcctctacttctctcctgctgtacagcagcagcacgctaagaaaaataacaaccggccgggcgtggtggctcacacctgtaatcccagcactttgggagagcgaggcaggcggatcatgaggtcaggagatcgagatcatcctggctaacatggtgaaaccccgtctctattaaaaatacaaaaaaattagccgggcgcggtggcaggcgcctgtagtcccagctactccagaggctgaggcaggagaatggtgtgaacccgggaggcggagctcgcagtgagccaagatcacgccactgcactccagcctggtcgacagagcgagactccgtctcaaaaaaaaaaaaaaagaaaagaaaagaaaagaaaaataacaaccagaagaacaacaggaatagatatttgctgagtgactattatgtgcctggaagtgttttaagtgcttttcacgtgtttcctctttgaatccttatagcaacattaggagggagggattcttagaaccattcccattttacagataaggaaacaggcttagaaaggcctcacagctaataagtggaagagcaagtatttaggtcacacagctaataagtggtagagcaggtattcaaacccagtccctctaatgtccacactcctgccttcgccacaagagaagaagaagacaggaaaaaataagacaaaaaccagacacagaaaaccaagaggctgaggttctgccactaagtgctggtgcaacctcacgcaattcaccaaagcaagcccctccttgtctatacagtgagcctgctagactcaccggtgtccctgagcctttggggcttggctgcgatcctatggttttcctaatccctgtgcgaggtgccctgacaagtagagggggtgagggaggagctgagttggcaggattctccagggcccagaggcagctgcctttgcctgggcagggcctcccgaggctatcaatgcctccctcctctgtggctgccaacctagtatcccaggcagatctcccggggctgctggggctatctattcatattgcaatttgaatgcttctggtcagaatgactaaaaggctgaattttacaagggttttgaaagtgaattgactccacttattaaagatatactagattacacgccgagtgaaaggacactctggggactccaggcatcgcagcctttcacaaagacggaaacatcccttttcgagccattcctggtaaaccacagtgggagacgttgcaccaagcagatgccgattaaattaccggctgaaggacacagtccatcagagaaacatcttggcccagaagggccactggtgaatgaagacgcagttccagaaatcccttctggttgttttatgtaaatcagtttctaaaggcaggaaggcaaaggcaaaaaggtaagtattcctgggaagccctgaccttcagtcatgcagcttataagggggagagagggagagaggtgtgacgggtagggaaagtgatggacagggaggggcacacaactgctctttgttttcaggttcagagcacctggggagggagtctcagctggtgggggcttcctctgtgcagatgaggaagcagaatagctggaaggacttcctggacttggaacctggcggcggaggaaggccctcccgaatccacgggatccaaccccggcacctcactgtactgatggggaagctcagcactgggtaatgggggtggggggcagtcaaaaacagggcatttggtggcacaactgggactgaaagacagtccaggctcttaactcaaggctctctcctcccactctcccatggagatgtaggcggctgtccctggcttgtgtcggtaagtctttcctctctctctgtgtcgccctgagaagcattcccttccacgcatcgctgtcaagagaagcagcagcatgtagcaggtacacagatcgcagttgcttgcagatgtcatagaaggtccaggcaatgtgtatgcaacaccggttgcttccctttctaagtaacagacacagattcagtctctctgaagcagaaagggagtttattggcaggctatcgggatctcagagaatcagaggagcctgcagggataggcttgaaaagcagatggggctggacacagtggctcatgcctgtaatcccagaactttgggagcccgagctgagcagatcacttaaggtcaggagttcgagaccagcctggccaacatggtgaaaccccatctttactaaaaaataaaataaaataaaatacaaaaattagctgggtgtgatggtgcatgcctttagccccagctactcgggagactgaggccagacaatcgcttgaacctgggcggcagaggttgcagtgagcagagatcacgccactgcactccagcctggacaacagagcaagactctgtctcaaaaacgaaaaaaaagaaaagcagatgggaactgaggctgctggagaaggccaagaactttctagaaagcacagcagtcaccttttagcagaaggactttagtctgatggccactctcttcgctgtacacaccagcccctgaatgagtgggttataaagaaacatcagttttgaatcactcattccagccaagcatgattagccaagcctgggacatgcatgccccagcttccaggtgtgggagacaaagattgaagggtcctatcttgggaggcaggaccctgtatccacataaccatattccaagggcatagagagtgcaatagacttctgagggttggacaattctcatgagggattgcatcatgaattccaaatgacttcaacagcaggggctgtgtcatcacacctacccagcaatccccccagagctcaccccgagaccccagccaaagttaagggttccagaaaccttcagaagggtgcagctgcctttgtttaggggtgtgtgagcgagggacttttcggccacctgtgatgggcactcctcccggcatgaggacgtgagagcatcctctgcaggaaactgcacagaaggggctggggggtctcccagattgatccctccccgcctcccagggaggaagaggctgctggtcctcccgtagtgctttcctgttggggctgctgcaggctgtgtgctttccaatgtttcgacattgcaatatttcatacttgggaagtaagaacaaccatgattttcagagttctatttcttgacattctatttcaagctgtagaaagtaatacttaacaaaagccttctgagcctaagatgcagtgaggctccacttggggaagtggatttctgctcccctccgtacacagaggggaagagttattggacattcctggggtggggggatgaggttttctgttttggtttgtttggggtttttttcatgcatcaaaagagagcaccagactgggaatcagaggaccgtaggcctagtcccagttttgcttctgatttcctgtgagacctgtttccactctgggtttttgctctcattcacagaaaaaggggtagtaaagcctctgcctgcctcggagatcggaaagtgtattgtgacaaggacactgctaggtacatgaactgttctagatagttgtttttgtttttgttgttgttgtttgtttgtttttttttgagatggagtctcgctctgtcgccccggctggagcacagtggcgcgatctcggctcacttcaacctccgcctcctgggttcaagtcattctcctgcctcagcctcccgagtagctgggactacaggcacgcgccaccatgcctggcaaatttttgtatttttagtagagacggggtttcaccatgttggccaggctggtctcgagctcctgacctcgtgatccacccgcctcggcctcccaaagtgctgggattacaggcgtgagccacctcgcccggcccctatgtgtgtgtctttattgaagaaagggtccacagcattgtccaggtttataaaggggtcctgacccttcaaaatagcaagaactccagttttagtcaattcctttgttccgatgggaaacaggccccctaagtcagtgtgaggagcctggggctttcatgcctaaagctgtgaacaattatctgagttaattaaaagctttggcggccaagccagcagcccccgccctcatgcccaggcggcctctgtcacacatgctgcaggtcacaagtgatgcatgccagtccgaggccccagcccggaatggggagcccactacgtgcccctccagaggctacaccacgatcaacatggagagaaagagcccaggcccccaggccctgcccagattgtcctcgcaaagacccagccaccctgttggccccgcgtctgtttcaaatcccatgcctgggatttctttttgacattaaagtaaatgttggccagagagccacctacaagggtgacgaaggctgccggcttctcattggagggctgggaggagactctgcaggtctctgaggactgccaagactccttcatcacactgagcagatataaaatccattaccaagggctaataaatgcggggaggccggcagaggacatgcccgccttgctgggagggcacacactcaggccaagaacagcaggctctccaggcacagccactcgccctccgatatttgcccctcctgcacgcacctctctcggagtcccattgttctccattcaatcatttgggcaccaattctgtttctctttgactataaaagcccatgcctgcagacctctctacacatttattgtgcggctggaatttatgacggattggatttcagaggagggattgattaaatacagatggagcacttgacaagggcctgggggtcccggtagactcccccatttagaaacagaataaagattagaaagcgtgagcaagggcaatccgaggtaagtcttgctttcaaagggagggagggaggacaggatgggggaagctgtctattcctactcaacagcatcttcttgaagctggatgaaattctttgcccggtggagtaatgagctgttgaggccactcctcagtgcctccaatgcattcagcctcctggggtacagggtgctctcctgctcacctgcgtagggctgagatggcagtgtggacctctcggctctggtaaataccgccagcacctttgctgtctaatcgcactgtgttcacacctatgtcccccactttcaagacttcacgctttggaaaagcgtcaactatctttcaaggcctaattcaaagccacctcctccatgaagaccatcaaaaccacaaccctcactcagtaacagtgaatcgccccttgcaatgtacaaccacagtacgctagcttccctctcctcctgctttgtttttattctgctttgaaaaggtctgtgtctaaactctctttgtgtttcttttttctttttttctttttcttttttctttttttttttttttttttttgagacagagtctcactctgtcacacaggctggagtgcagtggcatgatctagactcactgcaagctccgcctcccagattcaagtgattctcctgcctcagtctcctgagtagctgggactacaggcgtgcaccaccatgccaggctaatttttgtatttttagtagagacggggtttcaccatgttggccaggctggtctcgaactcctgacctcaagtaatccatccgcctcggcctcccaaagtgcggagatgacaggcatgagccaccacgcccggcctctctttgcatttctgtagtatgtagtgaaccttacatgaatggtaatgcaaattgaaaactgtctatgaccaggcgcgctgctttttatatgtgcagtggcagtttgtgcctgtccagtgtcaactccctccgcttcaggtaacagggcccccatcttcctcggaggagctgcctgccccacgttcagtccctgtagctgagatgatgctgatccatccccttttccgggggtggacatatgactcccatttgaccaatcagagcatagggattcgacgggagatgggcttgttactcaaggtgggccaatcagaggcagagaccagtaacccaggggcattggcttgctctcttggggatcacgggctcttcttttctgctgtgattgctaaatagagagaacatcaggctgaggctgctgggcccatttttgccaccatgtggggagaggctgcctgagaatgctgcctttgggaggcaggtgaggaaactagacaggagcgcgggggatgctggctttgtggaggctggcctgggtgcagcagaaagtcacctggggaacagcactgcatgggcacagccggcccagagacagcccaggctagggctggtactggcacatccaattcacagtcagctggcacaggcgggcaaggccacaggtgagaccacagcacagcatgcggccgctgcctgacttgtgccttcagagcagagccccagctcctggcagaagactctgagacgggggcctggccagcggcaggctggatgccagggtccagggagcagcactacagtatgctgggaagaatatcaaatccataacgagacccggtgacaaccactttccagatgggaaaatctgcactttgcttggtttctgtttcatctgtaaaatgggatgatactctgtatttcaatgctagtgtgagattcagatgaggtgatataaataaagcacctaggacatagcacccaagcagtggggtgatcgctactctgtgggcggggtttccagccccagcaggagtgtaggggctcaggaaagcagaccctgatggagtggctagaaactgaggctgcagctcagctctgacctggtcactgtgctgggccatgttagaaagtgaagcaagggcatagtaggcgcctgtaatcccagctacgtgggaggcagaggcaggagaatcacttgaaaccaggaggcggaggttgcagtgagctgagattgtgccattgcactccagcctggaggacagagcgagactgtctcaaaaaaaaaaaaaaaaaaaaaaaagaaaagaaaagaaaagaaaagaaaaagaaaatgaagcaagacatctcagtcctctttatatgcccagaactaagcaccactgtgcctggcgaagagcgggaccatagaaaatatttgctgattttttaaaaaatggagactgcccttatgtttgacatctgctaagatttcctaagccatctaaaaatcatctacttgggagaaagatcaaactgtgtggcagaatggaaaggctactagacttgaagtcagaggacccaggttgagttctggccctgtccccatgtctgcatgacacggagcaagccccttaatttctacaaacctcagtttcttcgtctgtaaaatggggctaatacttcaactaccccataaggacgcggtccagtttagaaacttctggtggcaccggaagccctagagcaagggcgtccactgaggcagcccaggcggaccagctggagggggaagccagatgtgtatgtgactcagagcagccaaaggccaggccaggaaaagtgttgccgagtgtctagtgtgacaggtgaggcaaggaaagacacaggattgtgagcaggagagagagtgcaatgggtggaaggaggccagggacacacttcggaaccaagcctgcgcgacaagctgaaaggttccctcttacgaggttctcagtggggagtctaataggtaacatttattgagcacttactgtctgctcagcgttattctaagtggtttcatgggcatttcccttaatcctcacaaaaaccttgggtgggtgctattttttcatccccatttcacctattaggaaaccaaggcatgaaaatcacacaggaatttaacttgtggctcgaattcttaatgagctgaactactgttggtatacaaaacaggagtggttatagtgatgtaaggaaagaatatatgtaaatgcattttataaattgtaaagtgccagctaatacgtgagctgttgttcaaagcattcagggaacttttttgacctctagtaactctccagaagcaatgtgttggctaattatggttaagaaaagccaaatctcttattgagcctggccctggagatgccactctcccccgggaggtctttagggccacacaggacggtggctgcacaagtttggtggccagtttgatctccacggctccctggactccctgcttcctgtatgcactcgagaaatcagtgtccgctgagggcttcctcggtcaaattcagctcaggcttagggaccactggggctgcagggcagatggcagagccgacatgtctgggatctgaatgctcctgcccctcgtgatcgcggcatttcagagccggaagtctccctagaattctccccagtccacaagacttgccaggcatggatagagctatctcggagcactgagggcctccctgtggcaggtggcaggaatgtgctgtgggcttccgggacacaggcacggtgaccttctgcagggctctgcaggccaggagtgagaggccttaggctgacctcaccaagacccacagtgaagacagaggaacgatgtgtgggtgggagattctggggagccaagccgaccagaagggaaacgcatgactaagttcagcggggcaggcagagaggaagtgtgggggtggaggaggccgcagagcaacacaagaggagagatccccagtcgggagggtaaaaggggacggggtggagggctgcagtgaaagcaaagggacagcagtgaccagaaggggttttagaggacatggaggtggacggggtctcagctgagatagtatttaagggtgctctttggggtaaaagtgccccagaaacgactgggtaagacctttgaaggttctccagaaaggattttgaggtgttggaatgagtggagggagagataaaactatgagacccagagtgtcatggggaatgacaccaccagggagagagaggacagcacatgcgagtggcttggactcctcaaggggagtagccagctgtgacaaggtggggggctggaaggcagccttagtggtgggaacggatggacctaactccaggccacaggcagaagtccagttggatggatggaaagcgagccagggaaaatagtaaaagcctgcaggtctggttcaaggaaaggatttccaggtatatgaggtcaagaacagccaaggggactctagggaaagcagcaaataaaggataaaggggtcatctgggaaggcaggtgcaggcttggggagaagactggggaaggtggagcaaggtcctggacaggctggcaagaggggaacccagcactggagctgaaccgggaggggagccctgactccggaagccagctgtgcactccaggtcggggaatgatcctgctgggtctgttgcctgagttcacttgggcctgacaaccagcccagggtccctatctgggatttcctggggcccttactgaggactgataggaagtacacaggatgtcaggtggaagcccctccaatccaggcccacgttattggactcagtcaacatgccagtgtggaaacagatctgagatctcggctcctgaactaatggagctcagtggggcaaggccactgcccttctgctgctcttcaagagcccagagaaccaggagccctttcacaggctggcccctcccaaaggtcacttctgtggtgatcataagcccatgatgatgtggacacccctgaatttacaggctctgcagggaattctcactactgtctcacgttgctaaaataaagagagctcctctcagaaacacagaagcgtgatggaaacctacactgtcacagagagcacaggggactttctgacttggacccttcctcttgctgttggccctggggcttccctcaggcccttccttctgcctttcagacccactggccacagtgcagttcatgcctccacctcccccactcccccaacacacacacacacaaacacactcggaccaccttcaggaaagcaggaaccgtgagcccagggaggaagtggagtgaggaaagcgcttctctcctcaccatctctcctccaaaccccagctccggcgggcagagggagaagggaccacagtgctgaaatagtaacagaacacaagaggcaaggggctcccatgcacatccttctgtcttcttctccagtccctgggccgccccagcttagtccccaggagcaccctgaccaaggctcgctcaaggtcaggagcagcatgaggctgaggcccatgccctgctctaggaggaaggaagcaagttcttgccatctgagctggaattgcaatggcagcagtacctccaagatggaattatagttctcaaatggcattctatctcggggtcacaaaaggacatcatagatttctgtggactatatgagatgtgacagacccccccgtataaagtcaatcagcctgcccttcacctttcattaattcagaagaatttactgagcaccaactacaagctaggcagggtccctgccctcaaggagctaaacagactagaggtaagcacagaaacagacagaaatcccgtgtgaccaagctgtgccggtggagcgctcggagtgcattttcatgtctctgtacactggggacggcgtatgcaacacaaaaacactgaactcgtgtgtttctgcttctgaaatagtacacgaatagttcgtgagaaagctgaagggaattacagaatgatgtacggtcagcccttgttcatgaagaacaaaaaattctagatgtctgggctggctgcgaggcgataaacgggaacttttatattctaaggatttagcttccatttgcaaagaaaaatgtttatttcttgcagtatatttttgtgtctttggagaatgctctggctgtggatgtttgcgatgggccagggatataaagttgacacctggacactggggctggttgaagctccacccacatgagtcagagaaaggcagatccacctggtgggaggagcaggagagagtgggaagatcctgaaacaaggcaaagcctgggctcggcctttcaggacacaagctgcaacaggaagtgtgagaatgggactgccccagcacacgccgagtggggatagggaaaggcaggaagatgagctcaggtaaactccaagtttgtttggtcaaattatctcctcctgtgcctcgttttattcatctatacaatgggaacaatgatgctctccacctcacagagatgaggtgaggattaaataagttactacatggcaagcacggagagcaatgctctagtaggtgctcaataaatgttagcttttattgtcactaatttttttctcggggggaaggggtggcaaataatccactatagtcatatcacatataaaagtattctcagtggtttctgtaaatcacatttcactttgcctgtgggaaaaaaaggagatgtaagttatttaaaataggcacatactttaaaatattgggtttattttaaaaactcagcacagtacaaactgccacacaaattactttatactagcaacaaccggtgctcctattaattcaagtgtacacatttaactccccaggttaaacaccctgtaatttaccttgaagctctttacattctgaagttatataaaattaagcaggaaaacattaacattaaatgaaaatcaattttgcacaaataagtgtgatcaagcagcttaaatcacctgaaattcttgtacttcagagaaaaatcccagatgacggcactggacaggttataaagagttcccttattccctgggggcgtctcaggcattctttctgcatgtttccttcactgagcctcaggctacgaattgagagaaagtctttccaggcagtggcctgattcttacgcacattccgtttctttttctgaattcagagtttctgaaaacacaggcttttctcttggaaaacatgatctgtaagatgttggaggaccaggctatgatggttcttaagtttcttcctttctctggggagacacagaggtcttcgcgccatccatctgttccctactcccacttgggttcctttgtggtatgaaatagagacacttctgacctcatcggagacacagcgaggtctgtaccttcacccaggcacaggagaaggcctggtcctctcctgattcctcaaacttcctctgaatccagagaaagttttttataccagattgtgtcaacacacagcaataaaatatgctgaggaactaaaaatgtgaaaatcacctaggaatggaacgttgaagaaatgtgtgtctattattgtgcactgacagccagggggctcctgtttggaataaactgcagcagaggagaggtttggcagcacagccagactgtgctctccctgagtctacagcctagtagggccagaggtcctgacaggaaatcgccaaagatgcaaaacaggggccccgtgatgggaccagctagtagccgcacttgtgttggtatcaatgccagcaagggttcaacagcaacctgaatccttgtgtgaaatatacgtatcgattatctttcaaaacattttcatcaccaaactgagccagaggaatgaacatggtatttcaataggaaaagtacacattctgaaaatattgccataatcaagttgtgttgcctgggcactgataagtgtgatacattgcatcatacatttccagaaccattgccatgacaaaagaaaatgcaaagtgaggatgacctccccggcactgccttcctttcagtgggcagcaccttctgggcctggatggacagctgaggatgaaaatttcctgtgggccaaaacaaagggtggtgccatcccttctccagtgtgacacaaatggcctcgcctcagagagcctttatgtagcagcctctaagaattctgaggtgaacacagcttctgcataatcttcgcacatatcctgaagttcagcagccacagcacccagagcttcatctaccagctcttctgaaaagctggaagacaaacaacacaactaaaggtatgtacaaggccaggcgcggtggctcacacctgtcatcccagcactttgggaggccaagatggacagatcacctgaggtcaggagtttgagaccagcctggccaacatggtgaaacccggtctctactaaaaatacataaaattagccgggcgtggtggcatgcacacctataaaccctgttactcaggaggctgaggcaggagaatcgcttgaacctgggaggtggagattgcagtgagcagagatcacaccactgcactccagcctgggcaacagagtgagattccgtctcaaaataaataaaataaaataaaggtatgtacagccatatatgggagccattcttttactcagctgtggaaattaacaagtcaattctgaaatctaaatggaaattcagaaggccaagaacagccaagatacttttttttttttttttgagacggagtctcgctctgttgcccaggctggagtgcagtggcaccatctcggctcactgcaagctccgcctcccgggttcacaccattctcctgcctcagcctcctgagtagctgggactacaggagcccgccaccacgcctggctaattttttgtatttttttagtagagatggggtttcaccatgttagccaggatggtctcaatctcctgacctcgtgatccgcctgccttggcctcccaaagtgctgggattacaggcatgagccactgtgcccggccaagatacttttgaagaagaaaaacaaggtgagaggccctgctctcctagacagaaggatggtggtgcttagatcccaaagtcctgctagagggacaggcctaaaacatacacaggatggacttcatcctcaatgtgtttgaaaccagaggcgaccagaaactaaccagctgcaacctagccccacctctaacagctgcctgaccggccgacggaggaaggggtgtgccttctctgtaggagacgggggaggacactaggggactctgcacgggtgctcctctgtacacacacacacacacacacacacacacacaccttcattttctgaacggcgcaagcttcgtatctcccaagtagccctacaaacaaggacattctcttaaataactatggtacaattataacaattataaaattaacattgatacaaaactagtatctattctacaggcctatctatctacaggccttattcaaattttgccaaccatccaaataatttccttcaaaagaaattttttgctagtccaaggttccagtctgggattccatgtcgcattttgttgtcacagctctttagtctactgtaatctaatagtccttcagtctttctttgcctctcatgaccttaacattttttaaagaataaaagcctttttttgggggggtggggagaatatccctcaatttgggttttttccttatgatcagattcaggacatacggttttgaaagagatgccacagaaggatagtgtgtcccttcagtgcaccatgatatctatttgatatccattaatgatgtcagttaattttgcatcactgggttacggtgatgtctgccaggtttctcccttgtaaagttactgttttcccctttgtaattaataggtatagtggagggagatactttgagactatgtaaactcctgtttctcatgaaattcgcctaaatcaattattacagggttgccaaacacggattttctacttccatcacttcttctccatttaatagctggcattctactgtaatgaaagctttcccttgtcttttacttatgtattcattcctatcagtttggccttatagatttttattttattgtatagtttgtaatccattactattattacatatttcgatgcttgaaaatgtcctggatttggcccgtaggtgcctcttgggaactcctgtgaactctcgacatgtccccatctttctttgagcacttcctttctagcacagtatgtctgaggcttatcttacatttttccagccccaggcttatagtcagccattcttccaagaagccctcgtgcctcttcatctggtgcctcttcatggagaacggtatttagaaaccaagatgtgggtactgggtgtgctcactgctactggcacctctgcttctgggccttctcagcagacaaactaagaaacaccctgtatctatttctacgtctataaaaaaccatatattcatcccagccttcccctagaaaccttgctcccattattcacaatgtacttacttatttgaccaatcctaaaatatagagaaaatagttttcaactgttaacccatgtcactgtataaaagaaacctacaaactagaatccagttatgtgtttacagttctttttgtctttagccagaggtaaagagtcaacatactgtgttcaaaagttatttaggcttcatgccgttaatatgattatattatttatttgaaatacagttaagttcatgtttctgtttgtattcgacttaaggcccccgccccatccctgttgactaaggggatgtataagaaacattaacatggtttcaaaagtcagagttacacaaaaatggtaaatgcagataagtttcactccccctctcctattccttctaccccattcccacccagtttttgttttttcgctaatctgacaatcttttgtcttttaattggcatgtaaggtcctttttcatttaatgttattctgatttgagtttatgcttctaaaataataggcattttctatatttgtctctttgttctctcttctttcttggtttcctttagattttgtaatttttaaactacatttgctcttctctattgacttggacattacacacacttttatgattctttaagtggccaccctggattacaacaagtatccatgacttgacgtctaacattaattgatattcttaccttttttcccatacaatgcaagaaccttagaatacgaactctattcccttcctgacttatattcttacatactattgttactgtatattttaaacgtgtgagtacacatacacacgcatccataaaacatcagtattgtttcatacagccaatattcactttaacctacctatttacctatttttaaaattcatgcctccctatatttctgaccttccatctgtgactgttttctttcttcccccaaaataccctttttaatatttcctacagtgaaggtctactgctaattcagctttgttaagaaactcttttctcaccttgccttttgatgtatctttcactgggcttagaactccagactggtagttcttttcgtttggaattttaaaagatgccaggtcttccagtttccactgtttttgtttatcttgatttttcttcctccagccgattttaagattttctctatctgtgatttttcagcaatattgagtatggatttctttttattttccttgcttggggtttttggagcttcttgaatctacggcttgatgtcttttgctactctggggaagtgatggccattatctcttgggatgttgtttgtgactcgttttctctctctcctgacctgagattccaacaacacgttagaccttcttacctcctctatgtccctttccctctcttcttcacttttcgtctttttttgtgtgtctccgggaatcactctggatattttcttctgtcctatgttccaagtctctaatattttcttctgttgtgtctaatttgctattgagcccaaccaatgaattcttcatttcagaaactttatctttcattctagaatgtccatttggattttgtttagttcccagttctatgccaaagttctaattcatgtcttttatttctatgaatgcactaggcacagttattttaatgtctgtgtctgatagctctaatgtttgtatctgccgtaggtctgttcttggtattgtcttgtccctctgttgcctggttatttttcaccatatactagacaatgtattcaacagtcgtagaaataaattgatttctaagatgatgttattttcctccagagaaaatttatgttttctaatgcatggtgcctgtggggcagtaacaatctagaatcacctcaatccaatctgagataatttggagctgagtggagtccctgagaaggcctatttacatccaggtcacctgtacttccagagtgcaatcttttaggagctcaattaaaagtgaagaaagttcaccaggacaattcccccactttagcaacccgtgaattccagcctctgtcctctgttctgaaaaggctgtcagaagtgctgctcatctccctacaaactgactatccagtgctcaacaaagggctaacctccccagggctctgtcttctccaggaccctggcccagttattcttcattacctagttaacttcttgatgccttcaagaatataggttttatttttaatacagcttttctattaacagttatcctcagtgggagaggtggtccagattaccaagtgcgtcatcactagaagcagaagtgattgcctcgtttttatgtttgcttcactttctatattcctatcactaatttatacccaaactgtgagagaaatacaagggtacttctgctacattccaacacattaggtactgtatctgtttttcttcttcttcttccttctttaatcttccccgttctgcatttccccttgtggaaccatccctgctggagtgctctttcccactactctaatctggattagttcttttctatgctcactgaaaaatcttgtcctggaaaggtttttgccattcttctggaagttccacggtagagtctaagtttactaaaactcaagtcttcctctttatgtacatcttgcattggtaatctagatcttccagtagcatgtgaactaaatttttaaacactttgcccacctgaaaatgtgtttttgtttggagtgcagtggtgccatctcagctcactgcagccttgatttcctgggctcaagcaatcctcccacctcagcctcctgagtaactgggactacaggcatgtaccaccatgcccagctaattttttgttttttgtagagaagaagtctcaccttgggctggtatcaaactcctgggctcaagcaatcctcctgcctcagcctctcaaagtgctgagattagatgtgagccaccatacccgggccctaaaaatgtttctattctatctgcccttatctttaattgataatttatctgagcacatgctaggttaaattttggaagtaggctctaatatcttctagcttctggtgttattaaaaacaatatgccattctcatttctgattatttgaatgtgtacagtttttaccctctggaatcttttgtcatctttcttttccttatattgagatgctcaaatttccttttcataatgatgtgccatggtgtgttctgttctattcatttattccttcactcactcactcacaagtagacaactgatgaaccctttcaatctaaagactaacagtcttctgggaaattttcttatagcatttctctgataatttcccattgctcctttttcctttttcccacattctggaactccagtgattcagatgttgaatctcctagaacggcttctaattttaaaaatattttattctctattatctagcttcttgtctttttattctactgcctgagacatttgacattttctttggatccttccagtgagtttacttgagccatcatgtttttaatttctaagaactttctttttattccctggaagttccttttttatagtatcctgttcttgtttcatgatataacagtttcacttagctctctgagaatattaattctagtctgtttttaatgttttattcttctcactgtattgtctgctttgcttcctcagagtgcttatctgatataatagcctatgtatcttttatcaaatatctggtcatctcaggtcatctgctcattttcaaaaataagaatgtcaaccaagcctcctatttcctgactcatctattgatacagtttgtatatttgttcccgctcaaatctcatgatgaactgtaatccccactgctggaggtggggcctggtgggaagtgtttggatcacgggagaggatccctcatgctttggtgctgtctttcttcatgatagtgagttctcatgagatctggtcatttaaaagtgtgtggcattctcccccaccccttgcttgctccttcttttgctatgtgatgtgactgttccccactttgtcttctgccatgacggtacgtttcctgaggtgtcccgagaagccaagcatatgccagcaccatgcttcctgtaaagcctgcagaactgtaagctaatgaaacctcttttcgttataaattacccagtctcaggtatttatagcaatgcaagaatggcccaatacacctacacccatgcattcacaagcatctgatgcttctaattcctgagtctcaaccaatgttctttacagataaacttggttcttgccttcatcctcattaggcacttagctttctctagcctgctaagtcagtcaccattgtctaactgctttatggcttccaaatttttattgatatttcttgtttgctgtcattgatggtttcatgtgttttattcattcttgtagtgacatatagtgggatagagatataggaagtaaagagaaacatatacattcatctgtccttttcaaccagaattcacttgattgtttttcaagccaggaattcttaagagtttgctttcaataagagcactgtcaccttaagcctttcctttcatatcactcttttatttgcattcagtttatatcacctgctcaagctaattgctggaacagtgcttttcttcaggtataaagaggaataaagacattaaaagaaaggaaaaaactcagctttctccttacccaagaggctttagatgaagtcaactgtctttggatgctttttaaagatctgatcaatataactctcatctttggaatattcaaatcataaactaaaaaagaagagatagtggctcatgcctgtaatcccagcactttgagaggctgaggcgggtggatcacctgaggttatgagttcgagaccagcctggccaacatggtgaaacccttttactaaaaacacaaaaattagccaggtgtagtagccagtacctgtaatcctagctactcaggaggctgaggcaggagaatcacttgaacccaggaggcggaggttgcagtgagccgagattgtaccactgcactccagcctaggtgacagagtgagactccatctaaaataaaataaaataaaataataaaaaaagaagagataaaaatgaaacagagctagactgttcatatgcactgtcacttggggtcaaagaacagcagaggaaaatattgtaaaaatccaggcatattttaatagctctgtcctctacattttaacctgttattctttataggctgagagattttccctacatccacctaacaactgtgaacaaaatgtgtcatttgatcaggtggtaagaacacacaaggaacagtctatcttccttggcttgcttttgggtttcccaatatcctggttagcctaagcaagccagacaggttacaagaaaatgagtacatatgctacaggagcgcgtgttaacaaaaggaagcaagtcgcgtttacttcttctcttctcccagataatccttcagaatacatgtgaagacaaatttgtgtctctaccagaacaaagcatcttatatactttgaagggtactatcatatataccaaagaaaagtctcaggacttcagggtcaacctgagggcctaaacacaagtgattatccctgatcccacccaaaatcccacttgaatacaaggaaataaataaatacataaatctacaaaaagagacacacgtgagtgagaaatgcccaagattttcagaagataaacgcacacagaagaatcataactgatttagcagcatagagggagctgaaacctaagagtctgtaagtgggggtgggagggatgccaggcaaaaacaagctgatttgtcctataaaacatcgtgaaggctcaggaagttaagagtgctgagaatcatgaaggcagagtgcagtatggggtagaaaatgaggagactggctgaaaatttgcagaacaagctgttggactgacacactccacccctattcgcagctaagtgacaatcccttcctcacccccacaaaagaaggaaggtatattctttggaaaaaataaaccagtaattttaaattcagccaagtaatcaatcaagtatgaagggagacactttcacacttgtaagtttcaagaaatttcctccaatacacaaaacaggatatgcgccatcaaaataagagtgtaaaccaagaaagcggaagacaagggcatcagaaaacagggaatctattacagggagacgtaagctaacaggaagggtgatgaggaagggaagccccaggatgaaaaccatccaggagatctggagagcagccgcctggactcaggtaggaggaaaaggggtctcaggagaaaaagtaagggtggggccgatcacagagattaactgatacttttgatccagacaaaaattatattattgagaggctggctactgcgtacgtaaagttaacaaatatataaaataactagcaaataaaaagaaatgtaatcatagtacactactatgctactatataaatgtaattatagtatactacttagctcaatgatgaaaaatatcttgcatgtttgtaacaaggtgataacttgcgaggaatttaaatgtgggccctgtttaaaaagaatagatttacacctatcttttaattatttgtacataaaaaaagggctacccattcttcaaaatttagtagctacaggatcttgttttgtgactccacaaaactaccttacccacataaagaaaggaggagaagggttaaagaaaatgttgcaaaatcagaggcctgctactgataaaagcaaatttgtccccaccaagaacatgccatggtcatggctgtttcctgcccaggaatattttgtgttctctgatgggacaacattagcattaacagcaacaggaaatcagctctaactgactcctgagtattgtacttctattgttaggggctgaatgtctgtgtttcccccatattcgtatgttgaagccctaacccccaatgtggtagtatctgtggtggggcctttgggagataattaggtttagatgaggtcatgagggtggaggtccctcaatgggatcagtgcccttctgagaagaggaagagaccacagttccctttctctgtcacttgaggacacagcaagaaggtggccatctgcaagccaggaagagggccctcgacagacactcaatctgccatcaccttgatcttagactccccagcctccagaactgtgagaaatacattcttgtttaagtcacgcagtcgatggtattctgtgatgacagcctgagctgactagaacccgatggtattctgtgatgacagcctgagctgactagaacccgatggtattctgtgatgacagcctgagctgactgggaccctctgcctagaaaaagaaggctgcagagcacccctgtggatggcaccgcctgtgctgttttacggttccctgtgtctgaaaatagagagcctgtctcctagcccaagaacaaccactgaaactccagggcccaaaagcatatgggataagaccttggctaatgctttctccagctttttctaagtctaaaattttgcaatttggttcctaaacagaggaccgtaacattttactgacctttcagctatcagccacgggttgaaggagcctacagcctcatgagatatgatccgaaggtactgctcaaaacgactacagtagtcaccgatgctgtgctgcatacccggtgggacaaagaggggagctcggccttctttctgttgagaatcttcggctagggagagaagaggggcctctcttttctctgatccttcctctgttcccacactttcatccagggaactgagaacaaataaaaatgatgaaagcattcaagatcatctgtaagcaagactaaactgttaatttaccctcatggtttgatagccaaaggctcatcttgatttctctttctcacaatgaacaaaactgaacaacctaacaccatgcgttgcttccccttttcacggaaccaaccctcaacatgtgggactatctgtcccttaaacaacagcattcttaaagcaaatcgtgcagtaaatatcactacaacccacatgtactgatgtgatgctttccacattaaaaaaacagctaaatgttattgaatacggaaaagctccttaaaatgcaacacactcaatgcccatcttgtaaacatgctatttactcagccatcttggagtttggcaagatcttgctcaaaggaagaatttctgtctgtcttatgggaactgaaagaattcaaaatctaataacatcaaaggtgactgactagaatgaaatcagaaagtgtctttgccacttacttgccattacagggcctttctaacatgatgttcacggctggatccttgcgatccactgtcttcgtgattctgattggatgaggagatagaggcttttcacttattgctgagattttttggtctagaaaaggagggtcataaaatgactgcatataaagaacagttggtgtccattttagagctgttctagtggccaagaacctgagagcaagttacatggacatctcttaagcacgacagggttggctagcagtgcaatgggaaaatgctcattttaaatgcaaaggtgaatttatatgttacaaagaaaccaatgaggaatacgttttaagaaataatgaacttgctctgaggaaggtttcttaaggaggtctatgaaaagccccaggctacatggcttccattaggacccagccacccactcaaggagtcttaagcaattgggttttttaacctttaaatgcgaagaagaagaagaagaaagaagaaggaagaagaaggaagaagaaggaagaaggaagaaggaagaaggaagaagaagaagaagaagaagaagaagaagaagaagaagaagaagaagaagaagaagaagaagaagaaaacactcacacctgaacacttaattagttgatttaatttgtctctgggcaatgctgaaaaaatctgcatgatgattgtcaaaacattaatttattaactataacttgcaggcttgacagctcttctgagtgtcagattatttataattttaaatgtatttcaagtgtaggaagaaaatttgtccttttcttaagtagggagcatctatatgtcaagcgacttggctcacatttatatgcttaatttcttgctgtcagacagaagtacgatataagtcagcttttgtaaaactattactgagagtgcaatcaaattttcaattgttctcagaggggataacagacacagatactgcacaatgaaaagatcactttaaattgggttttgtgatgaaattaaacaaacagaaccaccagaaacggaactcttactacgattccatgattccagaatgtgtccaaaacctcatttcagttctcagtgtcctagagagctccttttaaatgcatacctagactctcggcagagtcacagatagtgactaataatttaaatcatccttgaaaaaagagaacactaagtcctctgtaagactgtcttctacatgatgcaacctaactttgtggccagtggccaaaccatcagggaaacgaattgccctccaacgtttacctctcctcggcttccacacagaaagatgctaaaatgcccaagggctgactaaacaatgatgaaaagggcccttgccgggccagtcccattctaggcacagtgaggaacacacaatgacaaactctctgctttcaaagaatctgtggcttagttgagagagatgagacaccttcacaaatacctcgaacacatggtaggacatgccagaaagtgctatgggtgttcacaggccaggaagggaactaaattccagtgcagagatgccagggaaagcacaggccgagtaggatcattgagcctggccttgaagaacagcttgactgttatgtgagaatgaaaatagaggctggaggaggattgaggggaagagagaacaacagtagcaaagcacagagcacttgaaaacagagagcacacaaaaggtaacacattagtgttttgttgagatggcccatcttttggtcaaaatttgagagggggagtactttttctaacacgatacctccaagtcctattttacatgatgacatgcgacacaggctgctgtggtaaaccttccatcccccatttccttttgtcttcatgagggtagtactcacggcgcttacattccttagaggtaatgtttaaccacactttactctccttttcttgagtaaggcagtaaccgataagcacaagtcaaacagaatttgagtaacgtttcccagccaaagtggtgacagtaacctagccattgcagcccaaatacatatatatacattttgaaaagtggaggagaaaatcaaaagtcttttcagtaaatggaactagatcacatggacttccattaggaaaaaacaaaatgaaccccaacctctacctcaaatcacaggcaaacttttatgcaagatggatcatagacctacacataaaactaaaaccataaagcctatagaagaaaacaagagaatctcttcccacttaggagtaggtaaaggtttcttaggtcatagaaagcaaaaaccactcaagaaagaattgatgttagactttatcaaaattaaaaatgtctgttcataataaaacatttttggaaataagcagctgagcccattttttttccatgggaaaaaaaaaatttgtaaaacctctatctaagtagactggtggctgcccgggtgggagaaagaagaatggggagtgaggaaaatgttccagaattagttgcacaactatgtgaatatactaaaaacgaaagaattgtacagtttaaaaaggtgaaatttaagtatgtaaattatctccttaaaattattttagaaaaacaacaaaacaaacaaaaacatgtatctggaaaagaacttgtactcagaatacataaagaagttctatgactcaaaaagacaagcaaccccaaaaaaaaactgacaaaagattttggacgcttcacaagggaagatatacaaatgcctaataatcacctgaaaaggggccaggtgacggggctcatgcctgtaactctagcacttcgggaggccgggagcagtggttcacgcctgtaatcccagcacttcgggaggccgggcgcaatggctcacacctggaatcccagcacttcgggaggccgggagcagtggttcacgcctgtaatcccagcacttcgggaggccgggcgcaatggctcacacctggaatcccagcacttccggaggcagggcgcaatggctcacacctggaatcccagcacttcaggaggccaggcgcaatggctcacacctggaatcccagcacttcaggaggcagggcgcaatggctcacacctggaatcccagcacttcaggaggccaggcgcaatggctcacacctggaatcccagcactgtgggaggccgaggtgggtgtgtcacctgaaggcaacatggcgaaaccctggccaacatggcaaaaccctgtctctactacaattaaaaaattagctgggcgtggtggcacacacctgtagtcccagctacttgggaggctgaggcaacaagaatcgcttgaactcgggaggtagaggttgtggtgagccgagactgcaccactgcactccagcctggggaacagagtgaaactgtgactcaaaaaataaaaaaaatcacttgaaaaggttctaaatatcattattcaccttcaccaggatggttaccacaaaaaagactgatgacaccaaatgttggcaaggatgtaggaaataggagcaaggccgctttgataaagatttgtcaattttttatgaagttaaacacaaactaatctaatgatctggcaagtttgctattaggtatttatccaagagaaaaacttaagatatacacacagattatacacatgaatatattcatagcagatttattcctaatagcccaaaatttaggagctgaaagaaacaaggaatagatccttccctggagcctccagaatgaacttgccaacaccctgatttcagtcctttaccactcacttcagattctgacccccccccccagaactataggagaataaatttgtgctttaagccaccaaatatgtggcttaaacttgttacaaacttaaatttgttaataacagcaagaggaaataagcaacacagatttaatgtatttatgacataaatatagtatttataaaacactatggtgaatgaaagaagtctaggcaaaagagtacacaccgtatgactgcatttatatgaaactctagacaatcaaagctaactcagaaagcacagtggttgcctacgtggcggggcatgagggaactttctgaggtgatatgttctatgtcttgataggggtttgcataacagacatgtatccagttgtcaaaaaccaccaaatagcacagttaggatctgtgcattttattatctgtaaattttatcttgaaaaaaagagccataagtaaatattaaactctagttgataataagcatgctgaatatttaggggtaaagtgtgctgatatgtgcaactttgaaatgcgaacataagatgaactgatggatggatagagggataaataggtgacaaagcaaagagagtgaaatgttaattgtagaatctagaaggtgagtatagcagtgtttactatacaattttttcaattttctgtatgtttgaaattcttcagaataaaatgttaggggaaaaacatggggaaacactcaccattgttttcttcctgcatccaaagtcgaggatcagcatatgcgattttattatatctttgacgaacagactcctggtatttctttaaaaaaaaagaaaaaagtttaatttatgagaaaaaatgagtttaattacaaaccagaactggtaaagatgtaaaagttcagcagacacaactgatacggacgtactgccagacatgggcacctgtcaggccaggaagtaattagttcatgagacgaagtctaaaataaaatgaagcaattagcataaaggcaatctagcccagcactggccactagaagctgctgcagtgaggaaatgttctatatgtgccctgtccaatacagtagccactaactactgactccttagagtgtatttaattttcattaatttacagtttaataagcacctgcggctagtggctactgttttgagcaccccgggcctagacaactatcaccaaggggagatttcaagactggggtaaactgcggatctttaaactttcaaatccaaaaaaaaaaattgttttccttctaatgtttctatctagcagcaaagcagaaattagatttaatcatggtgcgatggaaaagaaaacgctgaattgagagtcaggagacctggattctcgttctggctctgccaggatttttttgtgaccttggccatgtcacttacttccttattgtacctcattttcctgcactgaataatccaggggttaggctgggtgaagcagtatcacagaaattgaagaagataaaattatctgtgatttgataggatcacactccagctgggaagaggaggcaactgaacagtacgtacaagctgacagatgcaaaagcctacgattccacttgtgggcccaggccctggtctcagggtcttcggaattacacatcagtgatatcgggggataataataatggtcacttactggattacatggcaagcagtgcgctgaatactctatgcctctttttatccttaaaactccctacttatcagaggggttgacgataccaaggtcatacagttagttggcaatagagcagggatttaaaactgggactgtgtgactctaacagatgaggctgcagaggcatgaggagaaattgcactcggcagaggccagcccctagcagcgaaccagacccggagccccagaccttacttccatctcttccattcggcgcatcatgatctccagatctgggctatccttgctgtcctcaacggtggctaaggtttcagaccccaagatcttagcatgagtcacagcccagagctcactggcacaatcttccaaaaaatcatcaagctgacgaatgttgttggattcaaaatcaacagctgcaacctacaagatggggtggggtggggaggagaggcatggggtggattaggggtgggaaggtgatataatgaaaacagaaaaacataaaaattattgttaatcataataaaccaacagcatacagatccaaatggcagagtttctatggtaaaacaagattctcctaagtcagtaagtatcaaaagcaataacatcagaatgatttttatcacagtcatttaaatgatagcattaaccaagtaataccattattgtccatgcaaattatcattatcatctgtttttccagttggtagaacaaatatcttccttttgctacattcaggagaatgtccaatattttacacgtcacacattccagaggatgtaactattctcttttggtgcagtgcttctgtgaaaacgtctgctcatatgacatcacaaagttcaggattctttgtctttgaaactctgtacctatcatctgggagagctctaccagcctttcttgacctggtatgttgtacattcaaaaagcactttccagtttccaaagcaattttacatgctctgtatttctcttgatttgaatgcatgtttataatctgccctgaaagaggcttttgcaaagaatgtttgctgggggaattaattatatcaggcaataggatgaaatatttctagaattaaattctggttctgcccattcataagcctgcaaatttgggcaagtttacttgacctctccgggcctcaatcctctcatgtgtaatatggaaataatcttgtatttcagagctgtagggatttcataagagcttgcacgctgagacacttagcatagtgctcggcatgaaataagacactcaatgaatggttacagctacggcaatttaagaaacctttaatgattcacagaagaaaatatgttaatggccaataaagatatgaaaaaatgtccaactttcatcaaaagttaaagaaataaaaatcaaactgaataaccaatataataaaattacaaaaaaatcaagagacaaccaataatgcttgcatgtgtatattttccatctataaagaatggaacaccaaaaatactatgtcccattaaaaaggataaggaaggtctcaatgcaatgatacagaaagagcacaaaaatatattataaataaagaagcagagtatagaacagcatatggcacctgcttgtggggaacttttcatatacttcttctgaattatttaaaattttggccatgtgtatgtataacttttaattctaaaagaactcatacattttggaaaaatatatacttcatgtgccagttcagttaatgacaacagtagcagcaatagacagatacgttataatggtacctttacaagagctttttcctgatatgagagataatcttgcctataagtaaatctacagagagctgtattttacttgcaaatgtctcctccattttaaagatgagaacactgagaatttgtgttcaaggtctcccaggtcttttataagttaacatagtaaaaacagttttcttcttcaccatgccaactttgatgagtttgtttgcttttgtttgttttcattcagttctttgtaaacactgactcttgacggtgctgcctggaatactctgcagtgaagctgctatttaacaacagcccagaattctaaatactacacagagttacttttctgtttcaataaattgtattaaacatcatgtaatgcctacaaaataattctaatatacaaggctgatcattcctagtatactcaaacatgtctatttcactgccagcattcataatcacttcattttcctttcatattaaagtgcagtatggagtggcctctctgggttaaatgttagccttactattcctctagaaaaaaaaatatatcatttagtggccaagctgcataaaacaccaagccataacagctgaatttgtaatggccaaatgtaggcttttagctttcagtcttagaagcctcacctcacatcagattatgtcataaaaccttggtacgataaagttataatcacagagattatgaaaatatgttacagctgaaatattgcttaataatcagaatagggacacattcttgaaacctaccttcttcctgcccctaaggtcactgggccaatggagcttcattccaatttccttctgctctgaaacctaagaaggaagttggaatgaagcttcttttccttgctctgggcaattaaagctataaatatctttccaaactccacaaagattaaatggatgcaacttgcaccttctgctctgcagctctaagcctaggcaaggcagaaacatttctacaaatattaaaaacaggtcctccagaggaagagtacagagtggacaacaagaaaatgtgcttttatttttctcaaatgttctcatttttttcctgggtcacctttttctctctgctagaccagatactggtcacatattaggcactcaaaacatgcttgcttaacaataaatattaggccccaagtataaagaaaattaggacaataatgagtgaaactaggctgaatgaaaggaaatgagggcaggcagccattcttctgccgcaggccaccaacattcagggccacacagggcacccacactctgttatccagaggaaggatagagccactaacaaaaacctgtggctgtaagatttttgtgctctgtttgcagggctgacctaagtcataatactaaatatacactggaagaattaacatgccaaatgtgaaaaataatattcatacttcttgagtaggataatctagtgtttgcaaagtaatctgtatttcattttcattacaactaaagatgttatcaagcaataataccagaatgccaatatcacacaacgcatacctcctgtgcaggctgggctttcgctgtgtttactgacgagccatctttcaaatgaatatttgcttctgtagtagaattgactctctattaaaacagacaaatacattcatggagtataaagacttatagctcctattagtacaaatgaattctattaccagaatgacttgtgtggaactattcatcagctttagctacattaggctttttgcagcaattcaaagcactttgtcttcatggaaacaaatgccatgtgttgatcttggctttccagcctttttcttccctcaactctgtaaacattgtcagaatagctgcatgctttatgcaagtcattcaacttctctgttccacagcttcctcaatgataaaatgaggaagttgaactacttgatttcttttttttttttccagccactccacagctcaagactacttgacttctaagagtcttcctagttctatgctactgagatttccatggactctaatacaaatttaacatttctctaactaaaaatagagaagttcagtggcctgtttagggaccccgaatgtcattcattccatttaaatttataatattcttctgtggcctcatctagtcatacacacaagattgcttctatttacagggtggagctacagggtctggctatagaattgagcttactgcttatgggaggatggcacaacctcttggtggtaccatctataatttcatcctcaagaaagtactggattgtgcacagaagctgtcctaacatctctctcctttggaaaaatagagctcatcattccaaaccactgaggtgaaaaaacacagcattcgagtgaaagctgctaatggaacactaacttcaccaacagatctatttcactcggaacagggattacaatcccaacttgtttcccaaactaaaatctcaactttctcaaaaggaggactttccccttgtccctttatctctatcccttttccacaatggagggcatatcagtagtgtgtggtggtctgggggtatcttccagatgccacagagacacttagccctataaaggatcaatgagacctctgcagcaactcattttaaatccaggacttccaaaaagcaagcaaatgaaacgaactagatagattacctgggccttgaccaagagaggcttcaaacgatccagaactgcctcctctaccttgtctgctaagtgggtggcagaaacactatttagaaataaaattgaaaattaaaatcaaaggcaataaaatatcctattttgcatatttatttgccactccaggagaagggaaataaaatgaccacgagcttctctaaccgttcatggccatatcaatctcctggggatcttgtgaaaatgtagattccaattcagttggtctgagtaaggcctgagagtctgcatttccaacaagctcctaggtgatgtgacagtgctgttcctaggccttactttatgcacagggatttaggtaacatctgaagtgtgtaacgcactgagtacacttcaaaaaaaataacggttgtcattaacagctaaagagggtaatcaactaaacaaaagaaactaattttgttccctctccaaatcccactaaaacaaccatagagttagctttacacccacaaggataaggaagaaaaaaatggtgctggaaaacaaaggacaaaagtgataactaacttagctgatctgagaaagctgacttctcccatccaagtactaaccaggcccaaccctgcttagcttcggagatcagacgagatcgggcacattcagggtggtatggccgtagacaggaagttgacttctagggccagcagtgggaaaaactagaacccacacaatttgtactgctgacttaggcacatgactggtagtaccaggtacatctaggcctgggctaagctgggagggggtggtttaaaaactgacgacaacagccaaatgatgtttgagaaattaagactcctagatccctttccctacttcacacaactatacagccgcctctttccaactctaggagaagtctgatggctcattctctgtgtgagggtctcttgactaggggcacccaatcacagttgaggctgtaggtaccatactgaaaagaggcagcggtcacgtatgcaggctaaatgctatgttattagactcacagccctcttccccaactcagctcctaggaagcaacatcctgatcttactctctgggccaaagatcagaaaacttctctgggcagtctgacccaggccaaaggaaagacctaaagaccaacataagtgtccttaacaaacagtccaggtgttactttcatcagatggtgttggaatagccagatatccattaaagaaaatgaatttcgaccagtatttcatctcatacacaaaaattaattctaaatggataacagacacaagaataaatggtaaaactataaaatacttaaaggaaaacataagagaaaatccttgagacactaacataggcaatgatttcttagctagttcaccaaaaatgactaaccagaaaagaaaaattgataaactggtcttaatcagaatttaacacttttagtcatcaaaagacaccattacaaagatctatgggcgagccatagtattgcgagaaaatatctgctgcacacatatctggcaaggggctcatatccagaaaatacaaagaactcaaatcaacacttaaaaaaaattctaataggcaaaagacttgaacacacacttcataatcagcactagaaaaggtgcccaacatcattcgccttcaaggaaacacaaattaataccacaaagagataccaccacattctcaccagaatcactaaaagactgacaagctcaattgttagcaaggatgtgaaaccaatagaaacgaactcacatgcactgctgatgggagtataaaaagctactactctggataatgcatatggctcatttaataaaatcaaacaactgcctatcctattacccagaaattatactcctaggcatttacccaagagaaatgaaagcatatttctacaaaaagccttgtgcaagaatgtatgtaacagcttgattcatactaactataaatgggaaagcccaaatgtcaattcacaagagaatgaacaaacagaatgtggtatattcccacagtggaatactactctgcactaaaatggatgaactatgctgatacacacacaatgtggatgaatcgtaaacattttcttgagcaaaagaagccagacacaatggggtagatcttgatgattctattcatataaagtctgaacaggcaaagctacttacagtaaaagaaatcaaagcaactgcctccgtgagggatgggggtgtggagtagagaacgaccaaaaaagacatgtgggtactttctaggttgaaggacaaattatctatcttgattagcgttttggttacccagggatatgcatttgtcaaaattcattgaactgtacctttaagttctttgcattttactatatgtaaattataccacgatagaaacaattatttagaaaactaaaatactaattccaacccacatactctgagtttttgatcggcaatcactccccctacgtttaaacatgagaagatagccaagattactaggtatctgaggaaggaaaaaaaagattatgtaggtcaaaaggcagaggaaatgtgttaatatattcagaaagaaaacagcactgaatccatgaaagaaggacaggcgaccactaagtaagagatatttggagaatataatagagctctcaacatttttaaattttaaaatttaaacactggcagaaatgacaaactcaataggttaaatgttaaagttggaggaaatctcctactgggggagggtaggggtagaggtagaagagggaaaaaagaaaataggaaaaaacagataagaaaatcagaggaccaatcaaggaagtccaacatcaaagaacaggagtttcagaaacagagaatagagaaaacagagacaagaaaaaaaaagtacaaaataaagcacgaaaacttctcagaattaaaggaaataaattgccaggcttaaaaggtctactgatgaatgaaaacacacccacaataagtcctatcattatgaatctgagataccctggggagaaagcagagtctgtgagcctctagagaaggataaaaagcaattctgatttctcattggaaacaagccaatgagcagaaatgctcagatttttgcttctgaagaggctgaaaaatgtactttccactcttcttcctgttaattacaactaagaatcctggacattaaatatatgcaaacataagaggactcggagagaagtagagaaggcacatcacctagggacactgggaccaaaagaatgacagagcagtgagttctttgggatttctctttgccttatatttcccagagtaggtactggagaagccggcaacccagaaacaccaataggcacagacaaaaaataagtcttcagtgcaaataaagtctgctctctctatcaaaaggaccaagaaaggggcagccgagaaagatggaaaacttagaaaataattgctctactgcagccaaacactgcagaaaaacccatggccacatgccagcaaagactgagtggagagcaaacaagtacatgaaaagatgttcagaggccactatacacccatcagaacgcctacaaaaaagcagagtgacaccaccaagtgctgacaaagatgcagcacaactggatccctcaaacactgctggtgggaacagacagagccactctggaaaacagtatggcagtttggaacaaagcgaaacaaaacataccactagcatacaacccagcaactgccctctgggcatttatcccaggaaaaaaggaaaacttatgttcacacaaatacttctacagaactgtttatagaaactgtattcataatagccccaaactggaaaagaactcagatgttcttttttttttttgagacagggtcttgctctgttgtccaggctggagtgcagtgacatgatcatggctcactgcagcctcgacttcccaggctcaagtgattctcctacttcagcctcccaaatagctgggaccacaggttcagatgttcttgaagaggtacatggttaaactatggtttgtttgtatccacaccatgaatactactcagcaacaaaaagggatgaactactgatacatgtgatgagctccatgaatttccagagaatgatgtaaagaaaagaagtccccaaaagttacatactatacaattccacttataataacactcttgaaataacaaaatcatagacagggagagcagatgagtggttgccaggagatatttagccaagcagtgaatgggggcaggagagaagtgggtgtggcaacatgagggctccttgggggtgggaaggttctgtatctcgactataccaatgttaatatcctggttgtagtactgtgctgtagtttcccaagaggctaacatctggggaaactgggtcttcgtgtgactctacgattacctcacaataagaagtttaattaaaaatttccaataaaaataatcttctatacccagtaaggctaccagcaaatatgagatggtttatcagctaataaagacattttcagacttgaaaggtctgaaaggatttacttcccattcatcctttctcaagaagctaaattaacctatgcctaaccccagccctccgggaggccaaggcagaaggatcacttgagcccaggagtccaagaccagcctgggcaacatagtgagaccttgtctctaacttgaaaaaaaaaaaaaaaaaaaagcagcagctacattagcatgtgctccatcaaaacaagcaagtaaactgaagaagattacaacacaatatgggaaatgggaggtctaagcctagattcctggcttgtcttgcccctttgctgatgaagtttctcctactcactgcagacctgctgtctgctaaggatagtcatcccatccccacagtagctgaccagaaagagctgagaagccgtgcattacagcgcagcccctctcctgacaaggcttcctcccgaagtccagtggacctggctcaccgacaggccctccagatggaggacgccctgtgtgtgcaggactcactcccgaccctgctcagtgacctcctgagaggggcacctacaactctcatgaaagcacaaatcagattaggatccaggctctgttcaacctgtcttcccctaggagtcttcatctgatactaccagaaacactgccctttccatgttcagctagatttgtgcctgtttctcagttttcaaaattaaacaagatattgttagggatacacacatagttgacagatttatgaagaagagtaatgaaaagatcaacacaagaatcaggacagtggctgcctctcgggggaaaggggatgcaactgaggagggatacactggaaacttctgcagcagtggcaacggtcgattccttgacttacgatggtggtgcgtggatgttcattctgtaatattttggattgcacatgtgcattcagtatgttcttctatatgtgtgatatgtttaatttctgaagtaaaaacacacagaggaataaacgggacacagaggatgaagcttttgctatatggcccaaaggacaagtgggtaagagtcacagagaaccaaacttcaacacagcctgaggtcacaccttcttagctataaatgaccatgaaatgtattccctctgacagtagtgactatcccatcacagagggtgtgtgtaaatatactggacagttccttggtggagatagtagagaggagccaaaagcctcagttggggggaaaagatccttcaaatcccaagattctgggattgtatgacttgaaatctttactacagacaaaaagtcttggccttctaatgataaacccacagcccttctaacctgagactgaacactccatcatgaatggtgacagaatgcacagatgtttcaatgagtgttctgttaatgtgactataggatgaattattatcagagttggaaaaatgaggtaattgcagcagcagctgaactaaatcttttaacaagcttctttatgtctatagtgcctatagtttaaaaaacacttatggagtgaatagaaaaagggaaccgcatttgaaaaccatagcctgcactcaagctaacatacgaaactaaagtagctatatgttgattcacatgagcagaacatgtatgtgcatcatactcatcttctgcccttagaaggactgacatctggctagagaaaagtacctttgagggtagtccaaacaaatacacataagactctgatctttcagacagaacttctctacaattacagatttttttcagttctccttcaaactccacacaaaagaagcatttcctagcaaaaaaatatggtataatatacaggtagacatgcagctattcattcattcatgtaatgaagttaggccttaacagtccaggttggttgctagaactatctagatcaattagaacaggcaaacatccactattcttcctaagaagcaaacacatacctcaattgttggagtctatacatttcttcagctttgagctcattcagttcctttgttcttctagaagtttcagcatcaagccaatcaagcctagagaacagtatcaagagtcaccccaactctcctcaaggcagagtcagggctcccttgagctccagtcttggctccccccttggcttcttaagtgacttcagtcttttaaggaggcagaagtgtagctagacctaaataatctctatttatcattaatgtatagagatgtagaataggcctgcttaccttttcctaactcagaagcaaatatttacctctgtttttgcatgctgtcaatttccttggcttttaactcttctagttccttcaatcttttggaagtttcagcatcaagccaagcgagcctagcagacagtcaaaagagtcaaaccaattctgcctcgacactgcagggtgtcatcatcacagaaacagaccagaaatcaggaccactgcagagcagagcaccaatccaggctctattaagctactcagtaggtaacataatctctccgtacccctaaagctctctagaacgtgttccatgtcaaaaaacattaatgcacaacgcaatgagaacctgtctcaaacgttctcaagaaaaccagctatcactcagacttggggtttcttattagactcaaacaaaaccattgctatatcttcaagttgagacaaacaatgagcccccaggagccatataggcatggtgaagtcaaataaaaacaaaagggaaaagttaactgtgaacaactctgctgtatgtaaaagtgctttgattcttttggtttaggatatatgaatattgtcaaattatttaatggaccgctttcatttttgttttcccataactgtaagaataatttcagccaaatgaatacagagaaacctgttctcactgttctcttcttatggaatgttctcacctcatctcccatattgaaatcctgcctgttcttcaggtcctagtttaatttccatccatgaagcctagacctctgcagccagaagtaaccctcccccgtttctaaactctctcagttcctaggttacataccgtgttctatcttaaattatagttaattacataacttctctattgactataaataagcaagggctgggattatggcctatttgccctttttaaagtctccatagagctcataacactgtcacatacaaaactagcaagtgatatataattgacacatatataatttatgaatgaataagaaaaaatagaagagctcactataagctatatagtttgactgaaacgtttaataaactacattttatgtatttattctatttttaaaaataatctacattttaaataaccaactttaaatgtaggaaagagaagaaagggttcacttccaagtctatgtaaaaggagctctttaattctcaaagatctgaaaaataccagcacaaacctggctgcttcatgctcaacagcacctgtcaggtgactttcctcttgaggatcttcttgctggagaggctcttttgtggcatctctggggctagttttcacctttagccatgcagcactgaaataaatggaaaagcatacctttgtcatcattcactccgtatccaatgactcatccaagtaggtgccagctcagagatgacaacagcattaaattaatggtgatctgtagcacggggccctacagtagaagctgaatgtgaagaaaagtgagatcctcccgcactcaggcacagtgtcaaagggcagaaattctcctttgcttcaaagaagccatcaccattttaaatgagaaacagtgatcaattacagaatattgggtgagtgtcaacaaaactctgtcacaatacatagatttggatcactaattacattccatattataaggcaactccgtatctttataaggcctaacagcactgttgagcctagaagcctcacccaccctcctctacccaccacacatgcactctaaaagacagtccattgtatatttggtttgtaatacaaacttcaaccactgagcttatcaactgaatgtaaatctccatattaatacttgtatacaaaaatacagaaaacagaatagagtaataaaaacaaaaaaagcacattatgaagtcagaagacctgattttaggtctggctgttacatgaataagacattaaattctctaaacattgtttccttaacttgaaaatgagagtggatggatgagcacggccattccttcacactcattcggaatcttagggggcttctcttccaccaagctgctcaccctgacttctgatggctccaaagacagaaccctgtagtcacctatcttctcccttctcccctgacatgactgctttttacttctttcctttttctgttccacctcctggtcctttccattgtgttttcaaaaactactgcctcacggcaaacgagctcccctttatcttcaaccgattcccctaaagattatttccacctaactggaccctgctcctcttctctctagccctgtgaaatggcagcttctcattctaatgtgctatgagtgaggatgacaagacagtaacatcaacattatcctaattgctccctgcagctaagacagtgttggtgagatctatatagttttatagttcataattatcttgacttagagttagaattattttaaaatatttatttactcagcaaagatttactgaatgcctactatgtgactagcactggacattcaaatataaaaaagaatataaaaaagacacagtccctggcctcaagttactagaatctattggcagaagagacaagtgaagggaagccccccatcttccattcaatcacacatgtcccggtgttggggtggcccatggaagggtgttccaaccacagtcaggcagaagaaggaaccaacaagcttccagacaaagacttctcatgtatgactcacccaaaaaaggatttctgcttaatggaaaaaattaaggctactacttaatttgctccttataagctacaggtcacctttgatatatggaggaaaaagagcatcacatacacaaacggtcccttgagttttcacataccatttaggagacgctggtggggatgtggggtttgggggtatccatggtgccttgcggtctttcacaggctgccggttcatttttaatctggatgaaactgttgtctgctgcactctgcttttactgtgaggttggctttgtctacctctttcagctttgcggagtccctgtgagagataagtaagaattataaggccacacaaataccaaagaaactatggtttaacctctgactcactgaagctccaagttctccatgttattcatgcatccattcggtaaaacctgagtagaaagcactgtggcagaaatttgggggagggtgtaaatttcattgaaacaaccatggtaggggcggggggtggagggtgtagaatttaaatccctggctctgcctgacacctttaaacatataaacaatatataaaatatatttttatttattcacaatttgtttcctaattaaacaaaaaaaatttcataccatattgttaaattatttttcttttttcttttctttctcttttttttttttttttttttaagagacagggtcttgctctgttgcctaggctggagtgcagaggtatgatcatagctcactgcagcctcaaactcctgggctcaagcgattctcctgccttagcctcctgaatagctgggatcacaagtgttagataccatgcctggctaattttttattttttgtagagccagggtctcactgtgttgtccaggctggtcttgaactcctgggctcaagtaatgagtaaaacatttttcataaaaatacttaacctctctgggccttaggtctaaatagaatgaatctagcgatttaaaaaatgttatcgagaatgcgggctgtctgtggagaggcgcacccatctgaattcctacaggttcaatcttgacatctcaatgattcatggtcgccccctgccatagaagtttgggaagaaacagacttgatcctaatccattatctgtcaataacttgggataactgctaactctccttttctggaggccacctgaaaataaacagatttgctaaagaagcctttgggcaagaccaccaaatgtcactaatacaataagggtattcgaccaggaggtggtcttttggccagttttccactgatagggccataagtaagttttaaacagaagcttaaaatataatgtagtttcaaatcaagttgtaccctgctggctcccaaagccatattagaaagcactcaccctaggatgcccttttaatatgcagtaattattattgatcgatatttatctttagcaggaactaatttttttttttctttaagacagggtcttactctgttgcccaggctggagtacagtggatcgatcacagctcactgcagcttcaaactcctgggatcaagtgatcttcctgcctcaggctcccaaatagctgggactacaagcatgagttaccacatctggctaattttgtttttagtagagatggggtctcactatgttgcccaggctggtcttaaactcctggcctcaagcaatcctctcgcttcccaaattgctgggattataggcctgagacaccacacccggcaggaaccaaatcttaatcccctcaagtctcacacttccaaatcagaagcagaaaaaaaactgaattttaaaatctcctgcccaattaggatattggtatcatattagttaggatcttaccaaaccaggaatagaaagaattctctattctagtaacaatattaaaaattgttatttttttgttaaaatatataaacaacttaaatagccagactcaaggactgcagcatccaattgcctgagaactggctccaccatataccagtttatgtgaccttgacaatgtcagattaacacaaatgggccaaaagagaggaatgatttcatacttgctgtcttgctggcgccagagtatctttcttcctaaacggcacattctcagtcacaggcttctttttccctgcttttgtttttgccacggctaacacctcgtctttgaagcttgcactttggtctagaataaatggtccttcttccagaactatatccgcatctaatacatcaagctcactctgcaacctctgggtctccggaagctccgtatcgggctgatacttatctacatggaaatttttgaaaaacaaactgaggaaaatgctattcaaatcaaattgctgagaatgattatctacacacagataggctccaaatacctatcctagccctgctgagaagcagatgttttgttgtcaacattgttcctcctcctatgaatattactgcaggtttataagcagaaacctaggtgtcacggttgactccctgaatcttcgctatcatatttactcatttacctggtccctttgatcctaattttaaaatagctcttacatttatctctgcccttccttcccttttgctattacccaaggtcaggcttgcagtatcctgtgactggaataacagtgtctcctaactgatctcctgtttatcttcacactgtcttctggctaccaaaattgtgcttctcaaatgtaatatttaaatgtcacttctggccaggggcggtggctcacgcctgaaatcccagcactttggaaggctgaggcaggtggatcacctgaggtcaggagttcgaggccagcctggccaacatggtgaaaccccatctctactaaaactacaaaaattagccagacatggtggcagccacctataatcccagctactcaggaggctgaggcaggagaatcgtttgaactcaggagacagaggttgcagtgagccaagatcatgccattgcactccagcctgagggacaagagcgaggcttcatctcaaaaataataaaaataaatacatacatacataaataaataaatgtcacttctatactcaaacccttcaatgggtcctaatttgatagagaataaagtctgaactccatataagacattcaacctgcaatgggaaaggaaataaagctgtctatttgaaaatgagacaatacagaaaatcaaagagactttacagacaaactattacagctgagaagaggggtcagcaaggtttctgaatataagaagacgaaaacataaaatcagtattatctccatatatcaaaataactaatagaaaatataagaaaaaaatctcattaacatgacaacaaaaactacaaggcacgttggaagaaatctaatgaaagaagtacaaggcttttacagaaaaatttataaggtaaaggacacgaaagaaaatctaaataaattgttttcatgaatgaaaagaccataaagatgtcagttctcccccaaaataatccataatttcaagtgcatattcaattaaagccctaacagattttttttcaaggatctaaataagttgatccaaaattcatacagagtaaaatcccagtagcccaaataattttgaagaacaaccaacaaagtggggagtggatggaggcaggagtcaactcaaccaaagacaaagtcttagtgataaaacattaaaggcagtgtgggagtgatgcaaacacaggcagaaatcagcgagacatcatggacgtgacaaaggcagcacgataactcagtgagtctgaactgaattgttcaaaaaacagtgttaagaccactagcatccacagagaaaaaaataaaacagaatccttgcctcacattgaacacttaaagtttaaatggaatgaaggcctaaatgtggaaagaaaactttaaaactttaattagaaaatatagcagactatcagtataacaccagggcagaagagactttcttaaagctcaaatataatactgacatatttgaacttaattggactaaactacaacttccatttgacaaaaagatatccttaaagtcaatagacaagccaaagtccagaagtagatctctgcataattaacataggactaatatccagactatataaagaacttctacaaaactataagacaaataaacaatccaatagagaaatagacaaagaacagaaactggcaatttagacagaaaatctgaattgtcaataaaaatatgaaaagatgattgacttcactagaatcaaaaatattcaaacaatgagatatcattttaaatccatcaaaagatgtggaaaaacaagtactctcacagactattagcaacttgattgttctggtaaagtttaagattcatatacactgcaacccagcaatctcactcctaggtatatactcaggctagaggaactctcacacgtgcacagaggaagccaggaacacagatattcatttcacttcatcattgtttataaaagcaaaaaactgggaacaaccaaaatgtccatcaataagagctgaaaaataaactatggtatattcatataagggaaacctatacagcagtaaaattaataaatgagaattcatgtatcaatgtatgtatcaatatgaaaaaaccttacaagcataagtgggggggggtaagcaaactgcaaaatgatgcatactgtaagatatttacataaaacaatactatatatgacagatacacaagcagtacaaatgtaaaaacagaactcgtctataatagaatgacaatagtaacttctagtgagggagaaaagagaatggaatgaggagaaaaatacaaaaggggcctcaactgtactgccatctggtttcactttcctcagtttcagttactcctcatcagccctgggtccaaaaatattcaatgggaaattccagaaataaacaattcataagttttattttatttttgagacggagtcttgctctgttgtccagcctggagtgcagtagtgtgatctcggctcactgcaacctccgcttcccaggttcaagagattctcctgcctcagcctcctgagcagccgggattacaggcatgtgccaccacgcccagctaatttttgtatttttagtagagacggggtttcaccatgttggccaggctggtctcaaactcctgacctcaagtgatccaccagcctcggcctcccaaagtgctgggattacaggtgtgtgccaccacgcctggctaatttttgtatttttcagtagagatgaggtttcaccatattggtcagtctcgtctccaactcctgacctcaggtgatccacccacctcagcctcccaaaatgctgggattacaggcgtgagccactgcgcctggcccataagttttaaaatgtgtatccatgctgtagacgctccctgcctgttagtcacctagtagctgtcttggtgatcacagcaactgtctcgtatcaaactgcttgtgttcaagtaaccttgaacttgacttcgtaatggcctcaaagagcaactacagtgatgctggcgattcagatatgctgaagaagctggaaaatgtcccctttaagtgaaaaggtaaaagtgctccacttaataaggcatgttggcaggtgcctgtagtcccagctactcgggaggctgaggcaggagaatggtgtgaacccgcgaggcgtagctggcagtgagctgagatcatgccattacactccagcctgggcaacagagcgagactccgtctcaaaaaaaaaaaaaaaaaaaaaaaaaaaacctaaatcctcagtctgtaatttatttaactcccaagcttatatacatcaaagcaactctgactgtaagtcctgttacctttctagtaatgatttgcataaaacagcatgtttcaggagtgagtttgaggacactgctggtggtgggaagggagccaccaccctcattgctgacaagttacactaatgcaatcaaccaatttaagaacagttcagaagctgcaaaaaaactgcaccagccaactattatgtaaatcacaagacagctgatcaaatcaggctcaggagtatattccaaatgaagagtacacagggagggttttccatccaagtggctccctagagtattttttcaggggtgggtggggaagaggagaccttaggaaatcagaatggaagaatagggtagagtgatacctaaaacagaaacaggaaaatgtaaccttctgaaatccagataaggacaagaaaaaacaacaaatataaaataaaactaagagggctaccataatcttaagtgttttactcaaggttcccaaagagtggcagagccaagtcttctggctttcggtcccaggcgagtcccattcattctgccttgtcagggcccatggagctgttccccataaatacattttccagagaacttaagtttacttctctatggccatgtaaaactacttttaaaatagccaccaaagatttgttttcttagttagaatatgcctaacacaatctagccttttcttaataacttggtgctattattaagaactaaaaatgccaccttacatttttacagcagttagcaattagataatttgccacttacaacaactaagtcagtcacaaaacacaaagactatccttcccattttacagataaaaaacttaagattcaggctgggcgaggtggctcacacctgtaatcccagcactttgggaggccaagacaggtggatcacctgaggtcaggagttcgagacccgaccaaccaacatggtaaaatcctatctctactaaaagtacaaaaaattagctgggcagggtggcacatgcctgtaatcccagctatttgggaggctgaggcaggagaatcgcttgaactcaggaggcgggggttgcagtgagctgagatcgtgccactgcactccagcctgggcgacaaagcaagactacgtctcaaaataaataaataaataagattcagacagattaagtcaacccagattcacaaactggcagaggtgggactaaaatctaggtctccttggtccaagtttcccccctttgcctcccagctttcctacatttgttcctgtaatgagttttaggttagcaggttttccagcttctctctgacactggtgtccatttttcactagtcagctgatgggcacctcaaatcttctacctcatttagcaaacacttctctgtgtgcaggcctggaatgctctctccatttcctccagtctatcaaaatgagctccctagcacccagaactcaagttactgtgatttgctgctcagagatcttttcttattcaattacacttcttcacagagtctttcaacaagcacttaagtgcctaactgtgtggcagatgctgggctcatcatagaggatataaggacaaataaatgtgacacccaccctcaagggaaaggctggcaaaggcagacttctaattagaaggaagatactatattacttctacctgcctaccaatgaaggagagcgaacatcccattaaagtgaataaatatctaacagtaaatgaataaattaggtttttattgtaatataataaaaaatatacatctggtctctagcccagtttctggcccagagctcctaaaacccttctaatttcccaagcactaggggtgctaggttcatcttttttcctaatatttggtctttaaccccagttcctgacacagagctcttatcccttggaatttcctaaggaagcattttgttttgttttttctctaataaggtgactcttggaggactcctggatgggagctggtcaccagaaagaccatgccatgattagaagcttggaactcccactcccatcctccatcctccaggaagtggagaggggctggagactgagttcgtcatcgatcatgcctatgcgatgaagcctccgtaaaaattctggaactagctgggtgcagtggctcacgcctgtaatcccaacactctgggaggccaaggcaggcggatcacctgaggttgggagttcaagaccagcctgaccaacatggagaaaccccatctctactaaaaatacaaaattagctgggcaaggtggtgcatgcctgtaatcccagctactcaggaggctgaggcaggagaatcacttgaacctgggaggcggaggttgcagtgagccaagatcacgccactgaactccagcctgggcaacgagagcgagactcggtctcaaaaaaagaaaaaaagaaaaaaaaaatcccacaactacagggtttggggagctcccaggatggtgaacatgtgggggttcctggaaggtggctcccctggagagggcatggaagctctgtgcccttccacatattataatttgtcctacgcatctcttccatctggttgttcatctgtatcttctataacaccctttatgataaatgggtaaacataagtaaagtgtttctcaaagttctgtgagccatcctagcaaaccccaggagggggtcaagggaaccccaattttatagcctgtcgctcagaagcataggtcacaacctgggacttgtgactggtgtctgaagctggggtctcttatgggactgaaacttaacccgtggtatctgactctaattccagggagatagtgtcagaattgagttgaattacaggatacccagttggtgtcccctggagaattgtttggtgtggcaaaaacccacacatttggtgtcagaggtgaagtattgagagtcttacgtaggaaaaacagtttggtttttctgtctcttacagttacacttgtagtagaagtggaacactaaactattaaggttccacagaatagtggcagattgagaaataaatcaactgaattctggactgatatatataactttcaaatcaatgagaaaaaaagaaataaaatattgattaatgtagtaaattacaacaaagaaaaaaacttcggcaaatgaaaaacaaaatcaggtagaaaaaagttcaaatatgtcattaatctcattaaatgtaagtagattgaatatagaactcttaaaacaattaaaaactccaataataggccaggcgctgtggctcatgcctgtaatcccagcacttcggaaggctaagacaggtggatcacttgaggtcaggagttcaagaccagcctggccaacgtggtgaaaccccgtctctactaaaaatacaaaaattagctgggcgtggtggcacgcacctgtaatcccagctactcaagaggctgaggcaggagaattgcttaaacctgggaggcagaggttgcagtgagccgagatcacatcactgcactccagcctggacaacggagcgagattccacttcaagaaaaaaaaaaaatcagaataatctggggaagatgaagaagataaacattggaaggggtaactcaagggggtaatttcttagatgccggtaatattctattccttgacctggatagtagttatacagatgtttttgttttctggtaattaattcagctataaatctatattattttgtgtacttttctatctgtaagttctactttttttttttaaatcaagggttcactctgtcacccaggctggagtgcagtggtgcaatttcacctcactgccacctccatctcccaggctcaagtgatcctcctgcctcagccttccaagtagctgggatcacaggcatgagccaccactcccggctactttttgcattttttgtagagacagagtctacttatgttgcccaggctggtcccaaacccctgggctcaagcaatacacctgccttggccttccaaagttctgggtttacaggcgtgagccaccacacccaacttgtatgttctactttaatttaaaaaaagaaaaaagaaaaaaaacaaactttactggacttgtccatacatatttataggtgatctcatctatctagagaaataaaagagttaactaacaaagtcccgtatttcatcaaatctaaaacatcaattataagacacatcagtattttatacatcaccaggaatttttaaatgtttaaaatgtttacaattttaaaatgttacaattaactacaagttgtcatcaattaataatgatttcaggagcattcaaatgtgtacctcagaccaacaaaatgcagtatcctaacatatacatccataagcaaaatacttagaacccagcagggagatggataaagaatatgaacaggcaaattacagaagaggaaataatatggctaaggagcatgtgaagaaacgacaaccctcaccaggaatcagaaaatgtaacagaaaacaagaagatgccactgtccactgatactggaaagcttttaaaattttattatataacatacttggtgaagatgtggggaaatatatactgatgtcacttctagtcaagacataaatgtgtgcccacttttaaggggcaagttggcagtatctgtttaaatgtacgtactgttatcacctaacaattccacttcttagaataacaaaaatttatctgaggaaaaaaaaatacatatatatatatacacatatatatatagaatgtatgtgtgtgtctctgtgtgtgtacatatctctgtcattaaaataaaataaactttttttaaagtagggttctaacttccagctctatgggaatttgccttgggtagcccaaacactatgatgtagcaaaggaaatgttactttctcaaccttcctctatagaatgcctccagccccaggaaacatcttggttgctatttactgatcctagttaaagttcatctgttgtgggctaggtcctaaatcctgactttcccctcagtgcagtaactgttatagcccagataattgtaatgaataaaatgtcttacaataaacactttaagacacataccggcaagaagctgctttgctacagaaggtcgacttgtttcctgtgggaatgtgtcctttgctgtgaggggcctcctctcaccctttggtgatgtacttggccatctctccaaggccttttggctaccgataggaaatctgctccgaatttcactgaaacattttttcaccttttttggtgacagtttcttttccaggagagattccaaagcctgccacaaaaacaatcaattattctcttagtttatctcgcaaaagtatgacttttaatcacaaaactgaaaataaggactccagggaaatgtgttattaaatggctatctctaacagttaacacaatcttaattaaaacatgttattatttaggatatctaattaattagtaacaatttctgtgagtactttcagatgtgtagctcactaaagccaatagcaaagacataatgaatatgactacttttaaaggcattcaaatcttaaaggatcatcattttagaaattaactatagtcttcagaatattatcccatctgcttcaaaagcattttaatcatcaacaaaaatctcataaactcagtcttttaagtgggcacacatactgtatttaacatacattttcctgaactaaagaccacttaataggtcaataagagtggagggtctgtgtctcaccttcctaaaaaaaggcatttcctctaataagttcccacccatccattactgggaagtcagggcccagtctccacctggtcaggacagattaaggacaactgaacacggtcaggaagatttagttcagagaacagtaatatagtaagaaaacatgctgtgaaatgatgtagggccacaagaggaaaaataacacatttcttgcattttgaaaagtaggggagataaacattctgtttaagaaacattaggttaaaggtactcttactcaagctcaaaatgtaggagagggactagagagtttcttcagatcctttataggattatgaagatgtgtactctaaattattttggccaataaatgtttcttacggatacgttaaaaaagcatcacatgacttgagatgctgcctaaaattctgaggtctgcatttgacaacagcattcctcacagtgagttctatatacacgaatgtaaccaatgaaaatcacaaacacatttgcttgataatgaaactgtgaaggcagaagtggccttaaagaccaccaagagctggttaatggtggtagaactggagtgtcatttagtctagaattctctccactatccacctttcttctacagctaacagcttactctgccatgctaacataaagatcacctttctatttgtggatgaaaatgtatggcgtaggggaactaatactagcatgggagtcagaaaatagaatttgatgcctagctctcaagaaaaataactgtcatctctccgatgtttgcttttctaaaaaaatttaacctgtacaacagcagtaaaacccattgcaaagcatactgccatagaaagggtcaaatggcataattacatggaaacaccatgcaaacttcagagagctataaaattaatgtgtctttgtcaccaatgaaaactaagaacactatcaattcctgtctaatacatgccagctgtgatttctagacgtctctagctatatcacaagatttgaggctctgattccatatactgtacctttaagtgtttcttcttttccaaaatccatctaaattaaacactgatattctaatctaagaatgctttactggtttccttttctatgctaataaatttttttctcaaatggcatgggccagggaatgggacattctgtttagttaatgaacctggtttaaagttgttacatgttttatattcaagttaccaattttcgaagcagtgaaatacgataatacagactacactgtaaaaatagcaaaacaaaaagaagtgtttcttctgccctctgcaaagctttaattcactaggtaatggctttgtcttgtattctccataaatcctaacgaaactaggtaatagtaagcattacttccaatgcacctctaacaaaaattggaattaattccatacctcaatttgttgcagaatatctataaccacatcaggaacagaagggtctgcatccagcttgacagaacaaagtgaaagctggcgaataaggctgcccagttccttacaccgagcaggaagtggatgctcccctcggtcagtaaactgagtgacaaacatctgtaaggcccgaatggctcctcgatgggcagccgccagcttagacattgcccatgactggtaataaacaagatgagagaagttatttccatactcagaacttgctaacattcacccaacttctaagaatatttatagcctgtcttctttctgtataaagtgctttctattgtgaaaactttttcatagtaaagggagttgtaaagtttaaagttttctagtggcagtcttttccttactacttccaattttttataccagcagcaacaacaacaaaaatctattttttagaacctgttccttagaaggcaaccatattcagaatatgtaaggtgctcactccctcactaacaggtttctgcaagtactgaaaataacattagtgcagagggccctacacaatactaacaaaacactgggaaatgtcatttataagcaagtattgatcataatttaattgcagcataccttcttagtgtgtttaattttatgtggactcaatttatccaattcttcctggatttcttttacctgttttgtaaaggggaaaaaagaaaacttcatacctttccattgatcttttttgtagaaaaggatgcatcgatatatctcctcttgtccaaatataaccattattaattcaagtcacttgaaaatgaaaaaaaggctcttcattcatgcacccaaaaaacagttactggtttccagttcaagatagtgaataggcagtgttcaccttccatcccttcgtccccagtgtaataggaatttagcatgaaggagtgaaggtggaggtgactctggaaatgtaggcgggccggatcgtgaagtcttacatgccacgctgaagagtttagctttcatcctctaagttacagagagccactaaagtcttttaagcagaggtctgacatggtaagattcatgttttagagcaatctctacggcagcagtgtagaataagaactgaaatagaacccaaaagaatacactgcaaaacctaactcaggcattttcttttaaatgaaaaagtacagcttttggttcaagcaataaaggctaacatgtgacttcagtgaccagaaatgagtaaaaggcttactaatgtataaggcatgaaagtcacaacaaacactttttaaaaatccatcacaatgtaaagaacgtaaatgcctgtgtatccgctactaaagatgtcctcaaagacacttaacatggtctttactctttgctgtttaccaaattatttactattacaagcttctatacattataaacatgaaatagatgggaaactaacaaggtccctttcctctaagactggggtccatagctaggaccaagggttcagggtaactgatccacctgacttcccatgcaaaaatatgtgctatataatgtataagcatcttgggggtggggaggagtggcttttaatagattctcaaaggtctatgacctcataaagtcaagaaccagtttaaggagtttggcgccacacacacacacacacacacacacacacacacacgcagattacaaaaagaaagagaattatttgcccatgtgttcaggtaattgagcctcacaaatctgtcagaactcatatgggatactctagtgctaatctttctgagacaaaaggaaaacagaaactctctaaggaagcagtacacaaggctgactgccctacttctccctgaacttttcacacctgctgctggaggacgtagagcattcgggcagagcgagcagcttgctcctgtctcctgatacggattcgacgttcttcatctggatccaaagcttcttctagtctatctgaaaatattaatagttttccccaaaagtggattataaaccatatattaaaacttacaaagacttcaattacttacagaaataataaagttgaagatctctggttttattaagaaaaaaatgaggctatcataacagaaaatttcatttttcatcagccaagaaaccagcagtaagtggagctgtgtactgactgagagatggaagggacataaagacatttactccatcaagctcccctccagccagaattcccactggacagcgatttcactatgaggcacctcttactattttagaattccttatattgagccaaaatctgttattcttgctattttttcaaaaactttttattggcctgtttttatgtttagcaagattagttttacaatgtaaagaaggtattaataaatgcctattgatcagccactaaatatgtcctgaaagacacttaacatggtctttagtctttgctgtttaatagagaataatcaaatgttgaattcaaaagagaaatcctggccaggagtggtggctcacccctataatcccagcactttgggaggctgagatgggcggatcacctgaggtcagaatttcaaggccagcccggccaacatggcaaaaccctgtctctactaaaaatacaaaaattagccaggcgtggtggtgtgcacctgtaatcccagctactcgggaggctgaggcaggagaactgcttgaacccaggaggcggaggttgcagtgagctgagatcgcaccactacactccagcctgggtgacaaaatgagactgtcttaaaaaagagaagaattaaaaaaaagagagagagacattaagatagcatcttattgtaaacatttttttctttttctttctgaggcagagtctcacactgtcaccagtctcacacagcaacctccacctcccgggtcaagtgattctcctgcctcagcctcctgagtagctgggattacaggtccacaccaccacactcaactaatttttgtatctttagtagagacaaggttttggcctgttggccaggctggtctcaaactcctggcctcaagtgatgcacctgcctcagcctccaaaagtgctaggattacaggtgtgagccaccatgcccagccttaatcttgatttcaaaagacaagtcttttctctaacatattaagatagcaagtctcaaaattatttgagtgtctagagtcttcatgtatttctcaggaagcatacccttgtacacactggtactctatatcttgaaaagattggttcaaagaaattgtttctggaaaactgtttgaagaagatgcaatctatctattccttccaggctgtggttttcaaatacacttatacaaacaaattcttatacgaaactccaatatactccaattatcaaagaaaagggagtcttcaattagtaaaagtgtattttataagttcaaatttttaatatttactctttaaaacatcaaacaatgcaaagagtataaggctgttttgaagaaagcaaaaatctgaagtcaggagttgtagatacagatgcagtctcaagagaccctatatgtctaattactttcatctcgtttgggctgcatggtaggggaaaatccggattcacatacttctatgaacataaatggaacgggcttaggtggggggtttgaaggctcactgcagatgattcccatgcagcgcctgcagctgtctacagagcagcactgggaagcacaaatgggccttcggggctacttcaaagggggtctgcagccaggggccatcgcaaaatattattaatccatgaaaggtaagtacagaaatttaaagtatatgtttacgtgtttccatagcagtttgccgctactgtgacatttttattatagttcacaaagtattgacttatgacacattgaaaattcatgtaaataaaataaaccaacccagtccttccccacagagactttgaaagctctgttctaacagttccccggtattaggccagatcaccagagcagtgggccttgtggctttgttcccctggtcgcagggcttccaatcaaagtaggtaggggtccatgccacaggctgacactaaggaatatcaagagaaacaagccacaacatttctgttatttttatgctggaatggttttgaattgttcatgatattatacaacacactctttaagaagacctacaggagaaatttctttctggccttaatatgtggaataattgttttccttacacaattgtttttttctgtcttagactttgtaaattctccaagtgatttgacgttccctctttagctggctcctaggaagctcagaagcaaatctgtgactcatccctagtaaatgtttttcctttccttattgtttcctttgccacaatatcctcatgtgcatttttgttttatcttattcaatcacaggtatttcttaaggtaccttaaattctttcataagatgcatataggtacatatgcatatattaattaaattgaaaatgcaaaaaataattctagactatgtactaccctagtgcaacggtttcttttgatgctcaactccataccccttgcaatctgaaagctgggcttggttccctacttgttagttacggtaaccccaaattctccacgtggaaccagtcttctactcagcagggaaatacaagggccctgagaacactgcagaactgtagaaaaccatatatgatgattaaattccttccttcctaccctgtgctcactttacacatatacccacaacttcccttgtcactggtgtgtactcacctaaatactgcccaagtgagaactggttttacctataatataaatacattatgctctcttttcaagcaaattgaaaaataattttcccagaagagggaaaacattataggataatttgcactcaggtcccagaagacctaaggttcagccaacattaatgccacctcgtaggctgggccctcagtcagtggacatttgaagggcagccacagtgaagaagttctttcatgtccctccgctggaaagaggagctggggcaagacactgttcaaactccaagcctaactgtcttgtcctgagtactcacactccagtgaaccaactcacagaaggaaagaatgaaattgctataggggttgagggtcctcaaggaatgcatttaaactaccccataatcacagccttaggtcgaagtaaagaatctaatttttctcaccttttttagttacctcttcaattttgtggatacaactgctcagttctttctggagtcgctggacttctagcaggcttttctgttcacttatgtttttgtggtcacctatcctgggatgaggctgaagtcccggatcatgggtgggtggcgaatttggcacagtaagatctgactggcctggatgagatgagtaaaggtatactttggcaccagagctggagatttctactttggatggctggtggctacactgacaggctgcttgactctttgattccttcctttccaccctgtggtcgggtattttatacttagtatgtccacacttctgagagctttgaggctgacttctgagatgatgttcttttatatgtttttcaaattgtcttcgtttcacatctcttctggctaggtggacagcatagctaagtctctcttgggatatgacggaaaatgaaacagaactgcccaggtcaggaccaactctacaatctgcatctttacaatggtatgattcattgtatgagtgcttcagtttttcaattctaatggcatgtgggcaagaatatcggatcgccaagttgcttgaatgtgtaggaacattcctattaaactgcagctggttctttaaaaagcaaataaaagtaagcagacatcagaaaaatttcatattgcacagttggtatatgtctataatcaaatttctaaaattttgccaccagatcattagtgctaagaggcatttttctgttttactgatagacacagccacgctcctacacccttgggttcatcacatacccctggttctatcctataatcatccagtcccatactattatccttctgtttactaatgtcatactgggaaccatctctaaaagtaaacccagaaagcttcaagcagcaaccactaagtccttcaatttcccagttatggacttctgtcctatttcaaaatgtcaggccccagcaagtgaccaatataacccattgaagctttcttaaaatttgctccacggatagatccaagccatctgatagtacttcttcaggtcttcctgagacttcatttggtggctggatccatcttttaccctgcccctaagtgtatctcacttgaaacagtccgcttatgctttcttacacaggctcaagtttttgtcagttttcctcataataaatacaagttttgtttcgttttgcacttaaacataaacatgtttctatatccctacagcttttatttatcattgttgcattttccaaaatccaatgaatggtcttttcatgcctaactataatgttaatattaaacatttagattgttccagtttttccactaatagaaatattacctcaattaatgtctccatgcatttagttttttaaccttttaaaattatttccttaggataaatgatctgttctgggattatcaggttaaaggaaagaaacgattttatggctttaaatatgtaccctccttaggcctaccagaatgaacctgtcaaagaccggtcaatagcctgaggagaatccatgcctacaaattcaatgaacccagtcctgtgatgccgtgaccttggagatggcctcccctgctctcacaatcaatgtgtttatataattacaggcatcaagagtcacttaaaaataatcaattgtgacaaaacttcagggaagtatttcggatttttaaaaagtagttagaaagctcactaaagaaaaaacaaataggtaccatctgaaagatacacagactgatgaacggtgtttgtcatttgaggtcaggagtttgagaccagcttggccaacatggcaaaaccccatctctactaaaaaacatataaaaattaggtaggcgtgatggcacatgcctgtaatcccagctactcaggaggctgagacacaagaatcgcttgagcctgggaggtggaggttgcagcgagctgagactaagccactgcactcaagcttgggtgacagaggaagacactgtctaaataataataataattataataataattattgaagtataaaaagatcaaaactgaataaaaacagggaaaaacatatgaccaatttaccaaaaaagaggtccttaagtacataaaaagatgttcaatctcataacacaaattaaaaatacatggaaataccatctcttacccaaccgattagcaaaaatttaaaagtatagcaatatatgctgttggtgaggctgtgggaagcaggcgccctcatagaagaggtgctggtggtcatgcaaattggcataattcttatggaggggaatttggcaatcgctaacaaaaacaccatgcattcatcacttttttttttaattaaaaagatttagcacaggaaagaaagaaaagacacttgaaagagacccaagcaggcaacttgaaggacaagtatcacatttaacttttgacccaggagtctcacttctaggaatttaccctgtagacacacctccaacaataaacatgtacagggttactcactgctatattgtttgtaactgtaaattattagaatcaatctgagtccccatgaaggagagtagctgagtaaacaatggtctatccacaaactggagtaaaatgaagatataaaacaaaaatgaggaagatctctgtgacacttctatgaattaatgtggagagattggaatatattgttcagcagaaagcactatgcgcaaaaagtatatttataatacactacccttcatataagaaaagaagacatgagaaaatatatatacatctgaatcacttgtgcaaaaagaaacagaaaacaaaaatcagagactaatgagattagttatctacagggaactggtaggaataggaaggaaaggacagagggaatggggtagcagataacttttctgaatatacctttttgtatatttggaaccatgttaatgtttcacatatacacgagagacaggaagaaagaaatgaatgaatgaagggaggaagagggaaaggaaggaaaaaaaaatccataaggatagtggaaaacccccaaataaataccaacagaaaccaatgaaccaaactgaatctcagataagtaacataaccacgctaaaaagtgaagatgaaaaaaattaaccccagtaacttttgaatatagcatttggactatatgccgtcaggctaaagacagatgtactctaaacaaatactgaactctaattttgcaggcttcttcttgagcagagacacggattacaattcagaaactaccttttgtacattccagaactgagcaaaaaagtaaatatattgtggataatgatagccagctttcatgctctgggacaagggagttggaaatatgtagtgttggatttgaattggagatacctgtgtgaacttgtgagttttaatacagacatataggcagacagacacagaaagatacatagacagcaagagaaggaggaagggaagagaaagaaagaaacaggaaggagatgagaaagtgtagctacagacatgtgagtacgggtgtgcatttatgaatgtgtgtacatgtatgtatatgcacacaagtatacatctatttcctagttctgtcctctgagagggcctaaaacaatgacatgatagtatcaaggagcacatccagccccagatagtgattttttaaatttcattctccactgaagaatcaaagtctccttggataaatggttaattccagggccaggacaaagaaaagacaagttgagcctggagtatcttttatttatttatttatttatttatgagacggagtcacccaggctggagtgcagtggcacaatcttggctcactgcaacctccgcctcctgggttcaagtgattctactgcctcggcctcccaagtagctgagattataggtgtgcaccatcatgctcagctaatttttttgtattttttagcagagatggggttttagcaacatggggtttcaccatgttggccaggctggtcttgaactcctgacctcaagtgatcctcctgccttggcctcccaaagtgctgggattacaggcatgagccacaacgcccagccttggagtgtctttttacaccataaagtggtcaaagactgatgagatcatgtcaaagagacactggggccaactagaagtggctctcactggctaaatcaaagaccatttgaacatcaaaataaatatctgcacatcaaaataaataatgagaataaaaataataatgagtctgtgctgaaataaataagtaagtactaggaaaagaaggggtttcctggagcagtgggaaagagccagattgcaaggagtaaggcaacaagtaaatgtagaaggaagggtaaaattagaaatccccatttgccaaccaccataataaaaaactgattcaggcaaaaatgctaaaagtagttggtgaaagtttgaggtgttaaaaagacattaacatagtctccaagacaaataattacaaaaagcaaaggagtaactttacaatgaaaaaaccaggcagataccaccttaatcaaatggtgaaagtcaacactgctagtgctgggactaaattggcagcatgtacttgctgatagggtgtcctgagaagcactcagtatcattcagtggttctcctgccaaaagtgcattacctgaatgtaactgtgagaagacatcaggcaaatctaaattgagagaaaatccacaaataactggcctatattcttaaaaaaaatcaatgtcacaaaacctaaaaacagactcagaaatcagattaaaggagactacagaggcatgacaatgtaatgcaccttatgatcttggattttcttttgctataaaggacactattgggacaactaacaaaatctcagtaaggtctgcagattacatgatggtatcgatttaatgttaatttctgattctgatcattgtactatggttatataatagaattctttattttcaggaaaaaaatacttagaggtaaaagggcactgtgtctgcaatttactcttaaatggtttagaaaataatttgtgtgtgtatagagatagtgagagagagaaggagggaatacgtagcaaaatgttagcatttgaggaatctgggagaagagtatccaggaattctgtggactattcttgcaacttttctgtcagtctgaaattatgtcaaaaaatttttttaaatttctttgtacaccacgataagatattattaaacacccaccagaatggctaaagagacaacaacaagtgttggcaaagatgtggagcaactggagctctcatacattgtcagcaggaatgtaaaacggtaccaccactatgtaaaaaggtccaatggtttgttataaaactaaatatacacctaccccatgactcagcaatttcactgttggatatttacccaaaagaaatgaaaacatgttcataaaaagatctgtataagaatgttcatagcagctttatttataataatcccaaattggaagcagcccaggtgtccattaattggagaacggataaacaaactgtggtatactcatagtatggaatgagaaaaaaggattaaaaaggaataaactactgatacatgcaatgacaaggatggatctcaaaaactttacagctagtgaaatgtcttaacaccaaaaaaatataaaatcccatttatataaggttctagatcagggaaaactaatctgtggtggaaaaaataagaatagtggctgcctctggaggggaggagtgggggttatctagcaaggggcatcaagagaactttctaggataacagaaatgatctgtatcttgatagaggtatgggttacacatatgtatgcatttgtcaaaactcagcaaatgtgaaaagatgtacacattgcaatgtgtacatctttcaccatttctgacgtaaaatgtatattgaaagaaaaaaatcagtaaacagggtgaattcttttttttttttttttttcttttttgagatggagtctcgctctgtcacccagggtggagtgcagtggcacaatctctgctcactgcaacctctgcctcccaggttcaagcgattctcctgccccagcctccgaagtagctgggattataggtgtgcaccaccacgcccagctaatttttgtatttttagtagagatgggggtttcactatgttagtcaggctggtctcgaactcctgacctctggtgatccgcccgcctggacctcccaaagtgctgggattacaggcgtgagccaccgcatctggccctaaacagagtgaattctaatgtacaacatgcatatggaagtagtttggatactcatgcctgcaattgactttgaaatgtgtcaaaaaataagatggattgatggatggatctctagagggatgactgagtgacagacatgcaacgaaacaagtaagtgaaatataatggaatctaggtgaggtgttcattgtaaaattcaactttgctgtatttttaaagattttcataatataatgctaggggaaaagacatttttgagacaactgagtaaagctgaataaagactggttattggataacagggaattttttgggtccatttcttataagaaatggtataagaatagtatcatgattaagtaggagagttcatttttaggagaagtattctcaaatatttagaagtatcaggttgactgcaatttgctttggggtgattctgcaaaaattttaaagacagatggttgagtaggtagaaaaacagaaaaaattgttagcaattgctgaatctaggaggtgatttcaaaagtgttcactgtccttttctttcaaattttatgtttgaaatatttaataataaaaatctcaggcaaaaatagaactacctgggtctgaagtactttggggtcgctcctcccatcaagttgggtcctaggtgctagatgaacacaggttgaagctggctggcctggtcccataatgtcaggtagtacagaacaatagtgacagccttgtcatccggcaacagtcttccctaaaaccattcctaaaacgaaacaaagctacttcagaccaacagcgttgaacaagggaaaagaacagataaaacacagtgccatgtgcatgtagcaatatactagaagtagccaatagtaacctcatactgagagtgactgcttaatgacaggtaaatgatagtttcttccatttataaaagcaaccacactttggaagttcccaatttcaaaaacaaaaaaaaataggggaacacttactattttaataataatctcttgagccctttccattccaaatttcaaatctcaaaggtctccagcaaggcgttattcccaaaacagagctttgccatggtaaactagcatgttccagcagggtggtttttggacaagcagtctacattaacaagtcttaatactagtcagaaagcagtatgcttcactctgtcaggtggcccgaaggcatataactctcaatgactctaagtaaacctgtagcatcagaattcctcgattcaagccaggatctgccatttggagagctgaatgatttctctcaatcttcatttcccccaatctttcccccaccctatacatatgtacacaagataatagatatgaaagcactcggtaagctatcaagggctacacccttatcattgccttgccctattctgaaggcctcattatagactttactatccctgccactcacgtactgatcacgtatagtattgtctcatactgttatttacctatttcacatgtacatgtctcatcttcccagccagacaaggcgacttgaggggaagggccttgtcttgctcttctatttcccattacaaagtgctctgagcatagtacacaatttagcatttgttgagttaagctgattttctgtgaactgactagttttaaatctctggggaatttgttctctcaaaaaatcctacagtaaatcaattgggaaattcaaggtttttttaaaaaaaaccctaatttaagcttttgaataaatccaaaatttgcagactagatttgcttaaagacagatacttcttgggaacataaagacagctgtctaagagtccttatttctaaggctgtagcacacatgaaaaaagcagatgggaggaggcacatgagcaaggcaatcccaactggcttgacgttggcacaggtgggtggctggagttgcagaatgaaggctgcagaaatggggcccggagatctgccacttttaaatggtcagtacttccctcctggctgcttctaggtgccaagggccaaatagtccattctccactagaaaaaaactaggtgatccccacagttccagcatgcctcaagtgatgctacacacacacatacacacacacgcacaaagtccagggacacccacccctaaactgtccccctgtacaaagttctgggactctccttgcaatctggccctttcccactgctccaggaaacgtcccaatttgtccctctacataccctggggcatctccacgaaaaccctctctcccccatgctgagatgcccttacagccagtgccttcatccgcaacccatgacaaacctaccccgaacctgttccctcccacacagccccaacttcttccctacacacactactggaacgcccccctcaatctagcctcccccacataactctctcccaaattgctccctctcactctgactgcagacactcctccagccagcctcctcccacttggctgtaggtggtctctgaaatggccaaggcctatttcctcccttgaaactgagggtacccccacagctgttcttgtccctgacatgcctagagcattctcataggctgtttcttcccccaaagaccttggacagctccataacctggccccaggcacacaggtgtgagatgtccccacagcctggctgcccccggccagtcccaaaatattcccacctcctgtctcatcctctgaagcccccactccccctgtggactgtctcctcagcacggtcagacctgagacacccacgtccgcttctgctcctgaggacccagtcacccacaccgcagcaggcgcacgccctgccatgggagctcctacagctgcaagcacccccagaggcagaggcaccctcccggcctcgggaatggctccaccgtgtctccttctccacaggcctgagacaccttcagagcctgtctccccctccacaggtccaggaaccctggcagctgtgggcccctcagtggccagtctccttccccatatgcctgagccgtcatccccagagcccgtatcccctaccattggccctggaagcccgggagctgtgggcactcccacggccatggaacctctagcagccacaggcctcccagcagtctgccttcttccagacaggccagagacatgctcaaagatggtcccctcccccacagaccccagcagccccacagccatggacactcctgtagtctgtctgcctcccaacaaacctgagacacccccagagccagtcttctccgccatgggcccaggcatcctggtcgaggtgggcacctccatccttgtgggacccttggcatctgcaggtccgcccactgtctctctttcaccccacaattctgagccagtttcctcttgcacaggcctaggcaccctgggagccacgggcaccccactagctgcagacagccccacagtgccaggcattcctgcagtttgctgcctccctgacaagcctgaaaagcctccatcaccaggctccagctccacagaaccaggcaccctaggagccagaaggacttcggtggccacaggagccctgaccctctgtctctgtccccagggtcttgggatacccccagagtcagtctcccccccaagcccaggcccctcaggcaccacaggaaccccaatagtctgtctcctcccccatgggcccgggaaggccccagaaccacaatcctccccgccagaccacagcttctcccgagccacgtgtccccctgaagccacggattcctccccgcctgaccacagctcctcctgagccacgggtccccctgaagccacggattcctccccgccagaccacagctcctcccgagccacgggtccccccgaagccacagatattctggcagcccgagtcctttcccacaggttcaaaatgtctctagagctgccttcctgacacacaggaccagacgcccacacagcagcaggcactctggcaggcacctttccagagccgggcacacccattgccatgaggacccctgctgcggcacacccctgccggggcacatctgctgccctgggtatgcccaccgtctcagacacccccacagcctgcctcctcccacactgacatgcaacatctccacagccagcctcctgatccactgacccagggacccctaaagctggaggccccagactctctggctcccccacagcctgcctcctttcccacgggctcagaacattcccactacaggtctcctctccaagcccaggcactgcctcggctgggggccccccaagagcttgctgtccgtcccacaggcccaggcccccgctgtggctcagctcttctcccagggctccaggtaccaccacagcctggggcacccttaccatctgtcccgctccccacagccctgggacactcacacagcccgtgtccttccccaaggccctgggtacccctgtagcctgttgtatcccccacaggcctggggcacccccagaacctgctgcctgctccccaggacatgatgactctgcagtctgcgcagctccccgtgaccctggatcacccccagagcctgtctccacccacacaggctgtcccctttccctgaaccctgggtcacctccacatctagtttcctcttcagcagcacagggcaccccaacagagtatcctgtgccccacgggccgggcatacccacagagtctgtctcctccacagcctgtctcctgtaacacacacctgcggcacccacagaagtaggctcctcctccacagcatcggacacccccacagcctgtcccctcccccatacgccaggggtggccccacagactgcttcatgtgtcagagccccaggaatctgcggggactgtcctctcccccacagacctgcagcaccgccacagccgagctctccctccatggctctgggcgctcccacagccccagtccaccccacggtcccaggctcgcccatagtctgttctttttcacaagggcctgagacaaacccatagcctatctcctccccagtctcaggaacccccacagcttctcccctccacaggtgcggggccatttcagaacttgacgccaaagccccaggcacactcgcaggaggcaccctcccagcctgtccctgtccacagaagcctaaggctctctcgtaagctgcccctaagcccagagctgtgggccctgagggggcccgagggatcccccttgcctgttccttcacccagggccctgtaagaccgccgcggcttgtctctacccaggaagctcggccaggaacacccctttcgacaggtccctctcctgcaggcacgggatggagctcgactctacttccttccccacatcccgaggcggccctcatagcctgcaccttcagccacaggtgcagaatgctctcatggcccagagatcccgggcgaccttttctctcgcagccccggggacttctatcttcggtctcctcctccccagacccggtcacccacacagccccggcaagccccaccacctcgggctcccccacagccccgttcacccacacagccccagggtcccttgcagcctcgatggagcctggggtcccaggagctcccaaagcctcattcgccccggcggcgtcggctgtctccgccgcttgtctcgtcccccatggccgctgacggccctgtggcctttctgcactcacacagcgcgtctcccactccgagggcttcgcccggcgccttgctccacggcctcgggacgtccctgcgccccgtctcttcccccacggccgccgaaccccccgccccgacctgctgggccccacgcagcgacccggcatcttagccgcctgctctccccggcgcagcctgggcaaggccccacggcgagtctcccggctcatagctccagggcagttcccttcctccctaccgcggccctgggggatgtcttagcacctcgctccctaagctgctccacacacgcactcacacactccgctccggccttgcagcctttctccctccgagcccctcacccatcccacccccgcccagtctcgggaacccgcccccagtcccaggcccccgtaaagcctagacggcagaaaaggtaactggggggacaaagcaacaaaggctttccgagtcagatctcctctcccccaagtccatgactctatgcggcttcccagaatcccccccagccccggcccgagcccacctggcctagggtgaggcgcggctactgggaggcgggcaacgggggcccccaacaaggccgcgcttccggccgcctgcccagtcgccatagcaacaggcgcagggcggcttgggagcctttgaggccctgaactatttaaggatccaggtgttgcaaggcggtaagttttgcagccagtgtccatgaggtcggggctgggactagattagggtagatctaagcctgggcttgggagtgcagctagcgcagaaagatctgaggaactagagcaaaaagccatgcggatggattgtggtcgtcagaggctcccgtagtctttagcggcgctggcttccgcaggctccgccctctcttgcccacccggaaacagcctcgccccgcctacgcgggacccaaccgcggcgaccggacgtgcactcctccagtagcggctgcacgtcgtgccaatggcccgctatgaggaggtgagcgtgtccggcttcgaggagttccaccgggccgtggaacagcacaatggcaagaccattttcgcctactttacgggttctaaggacgccggggggaaaagctggtgccccgactgcgtgcagggtgaggccgggattcgggggctgctgtccaatggaaatggcaggaaggtcgagcctacggccagaaggggggcttagcggaggcagagtcttggttccagacatccgcggagcaatctgagctgtccccaagtctccttctattaaatcctaccccgccctgccaagagcgctcttccttttaccaccttacccggatgatcttggaatctagttccttaaaacttctcactcccccagtaccattagtgtcttacaggatacgtgagttggtcagcaaatacatgtgctttccattgttacgggcgcggtggtgcaggggcaaatcgggactgggatttggtccttacccttaacgtggctctaagaccagaagggaacacctgacttgtgttgacctcttcagttagctgcaggttaaagtctgagtgcttaccaagactgggggaagggggaaagaacacagtttatacgtgcctgattgtagagttgacgtgcgattattttatctcaactttttttaaagctgaaccagtcgtacgagaggggctgaagcacattagtgaaggatgtgtgttcatctactgccaagtaggagaaaagccttagtaagtggcaatgtataatctacctcgcagacgtgcacaaattgcatacttaggcgggaagggcctcagggacttacttacccagtttgtcttacaaggtaatgtctgacaagttaaacaattagaagctattaaatacaaatttaaaatgcccacctgaattaagtaagggtaattcaacgaatttggtctggtgtaagcccagaacttagctggctttacttttatatcttagtcacactttgaaactttgcacagggtaattagtagattaagccatagtccgcaaggttttttaagtgtttgcaagaacagtgattactaaaaaattaaatgtaggactatgtcaaatattaagcaaactgtaataaaccaagtaaatttttttcatgatcactttttcttttcgaatagttggaaagatccaaataatgacttcagaaaaaacttgaaagtaacagcagtgcctacactacttaagtatggaacagtaagtatctttaaatatgctgggcctgtaattcactgtcagaactcttttaacttgctgtggatccagatttgaaaagatcttgacatttcatctcaattccattgttgttcagagtgctgctgaaagtccattcctatggccaatcccaataaactgataatgtaaatatctagctattaggtctttttcatgttaagtcactcttaaaaaaccagaaagtaggttgactcataattccttaaaacatttgcatcaacagttgttttctgtttaattcataattctggttaaaaagtaagggcatctcttctagttcagtcatgcccctgggatcctaaattaaagagttgaggggaagaagagggcactgggcttgctgtctcctgttttagtctgtggagcttcctggtatttggggtttaagtctcttgagccaagtatgttagtgattcatcttacagcaaatatattgattctttcataaaacttgttataactagatgatagtttctgaattgcgtaatttctgtgttcaaagatgagtgtcattcaaggcagaactcattccactcctaataacgttttatagaagtagtgaagatttgactgtttttctcttacagcctcaaaaactggtagaatctgagtgtcttcaggccaacctggtggaaatgttgttctctgaagattaagattttaggatggcaatcatgtcttgatgtcctgatttgttctagtatcaataaactgtatacttgctttgaattcatgttagcaataaatgatgttaaaaaaactggcatgtgtctaaacaatagagtgctattaaaatgcccatgaacctttagtttgcctgtaatacatggatatttttaagatataaagaagtcttcagaaatagcagtaaaggctcaaaggaacgtattcttgaaggtgacggaaatacctaaaaactcctaaaggtgcagagcacaccttccaaatctctcaaaagatcagtatcttttattttaagttatctccatctgcaaagcaactgatgatattcctgaaaccccttctttgattttggaatgtagaacctaacctcaccactgaaggaaagcacatgacctctaatctagcctctgcttaattcaggcagttttgttttgtttaataaaaaacagactcctgagcactagaagcagtttgttttgcagctgtctcaatgtgctttacttgggatgaggcaggtggcggagagcggccggaaagactctataacccagttctgggaagaactccaagctgggagtcagtcacactgactctaccacttactagctgtgtaaccacaggcaagttactcaccccgtccaaacctcagttttctcttctataaacaaggttcttagaataaaatgagaattcaaggaagcacttaacatagcacctggtttgtggtacctcccaaatcaatggtagctttcccaaatgaacacaagtatttgaggctcctcatgtttgttctaaagtcaagagtccagttagtaactaaccactagttgtcctgccatgactaggtcaagtgaggccacagtgattcagtgattcttaaagccaccttgcaaagcaggtaatacagttatttcctgtcctgcagaattcaagaacctttatgcagttcctgtcctatgatttaaagaggtcagtgactccgctactctcactacatcttagagtagagtggtagagtagttgatctgagacagtaaggttccaggagatggtcttgccctactatatgtcaggaacagctagccttagaattcagtatacttggtggcccacccctaccccatgccccagtgccttatttggtctaaagcacctaacttttccattcttaatcagctgattatgctaaatgcgtaaaaaagaaaaacaccttacaaatccacagggaaatcaaagaacaattcaggtttaacagaaatagtctattaacaataaaaagttggatgaaaaagcacactaaaggttctaggggctaccataataaaggtagataggaagagttttcattttttttgtcttcactgtacaaaagaaatacattatatacatgtattaagtgcctcgtttgtatccagtttttcattttcccgatgtgttattttgctgttgctgctctgccaaggcttgctgaaggcgcatccgcttccgggaatagtgctgccaatgtagaatctgctgttcatcaataaatttcgcacactgagcattcaccagctcctttcggaagtgttcatattggagcagctctaacatgtgtaaacactgagggtacctgggtttaagtttgtaagtgaatgaacaacataatttaggtaaataatgccaaggtataattcagttattctcttaaaaacgatcttgtagcctaccatttctataacagtaacttagtacactctggtagcatagggttttttccccgattagtcatcaaaggtcagtgttcaatattttcgaaaatgagaaggtttaagttcagaaagattaaattaacttgctcaagaccacacaacacagtaactggtaagcagagtgaaaatttagggacaaaccatgctattcccttctagcggtttccaacgtgaagaacatgaacatattttagtaattatgtgtttaattgatagttactcatttttccttcaatagggataaaaagacaactttcatttaaaagtgagtgtgaaagaggactatgcgcatacattgtactcttgttgtccacagggatataccaattctgaaattagatatactctaggattggacaagcaaatatactgtggataaggacagccaaatttctggctatcagaaaaggagttatagacatggaaaggaaaaaggctagaatgaaccctgtgttactgagctggtattgaaaacatcagtatgtacttacggcttttaatatagacatagaataaacatgtatatgtgtgtgcatgtatacacatacatacatatatatatagttcttgagctttgtgtactgacagggcctagaagcaatgacactgtggtactaatgaacacacaatgaccagactgtggtttccaaggagcaggtttccttggagaaaagggtgattcagggataagacaggaaaagtacaagatgagcctggaacattacgtagtgccagaagaaaaagtgctaaaaattcctgggaggatcaaaagtattcaggagccaacttgaagggcctcccaatggccaaatctggaatacttagcgcaagaaaatacataattctaattcataattctactaaaaataagaatccaaaagtccacactaaatggatgtaaatttctttaataaaataataggaaacaagggaatataattccttacaatcgaattccaaactaataaatgcagaatgatagaattagaaaatcatcacagtaaaaaatgtttcaggcaattatcttcaaaagatgctaaaacaggcaaaatacatgtaatatgatatttacatagtctcaaaggatttccctataagatacttattaaatacacaaggaaaaatagcaacttaatatggagaaacctagacggtaccaccctcaaccaagttaccaaaatttacgtcaccagtagtgggacaaatagacttcatgtgactgcagatatatgaaggatacaaatcatttctgtcatagtcatggaaaagaaaagaccactgagatgaaaggagactaagaagacatgacagcaaaatgcaacatacgggcctagactggatcctgcactacatacagcacaccagcagaacaactggcaaaatgtgaatgaggtctgtagattaggtaataatattaatgtgctgatttttgctgattgtagtgttacacatttggaatacgtgggtgaacaaaatacaggaattatctttactatttttccagctattttgtaagtgaaattatttcaagttgaaaagacataaaagctaacagacaattaaaatacattaacatataggaagtgtggggaaaagagatcagattgttcctgtgtctacgtagaaaaggaagacataagaaactccattttgatctgtactaagaaaaattgttctgctttgagatgctgttaatctgtaaatttagccccaactctgtgcccccagaaacatgtgctatattgaatcaaggtttaatggatttagggctgtgcaggatgtgccttgttaacaatatgtttgcaggcagtatgcttggtaaaagccatcgccattctccattctcgattaaccagagacacaatgcactgcggaaggccgcagggacccctgcccagaaaagcctgggtattgtccaggtttcccccaactgagacagcctgagatatggcctcgtgggaaaggaaagaccttacatcccccagcccgacacctgtaaagggtctgtgctgaggaggagtagtgaaagagggaggcctctttgcagttgagataagatgaaggcttctgtctcctgctcgtccctgggaatggaatgtcttagtgtaaagtcgaccattcccattcgttctattctgagataggagaaaaccgccctgtggctggaggcgagatatgctggcagcaatactgctttgttgctctctgctagttagatatttgtgtaaagtgaaacataaatctagcctatgtgcacatccaggcacagtacctttccttgaacttattcatgatacagattcctttgctcacgtttccctgctgaccttctcgccacctgttgccctgctacactcgcctcgccaagacagtaaaaataatgatcaataaatactgaaggaactcagagaccggcactggtgcgggtcctcgcatgctgagtgtgccggtcccctgggcccactgttctttctctatactttgtgtcttatttcttttctcattctttcatctccacctgacgagaaatacccacaggtgtggaggggcaggcccccttcaggaagtatgcagataaagccaaagttgcacaagtgatatgcaaatgactaaagtgtggaaaataggatactacagcaatgcttctaaaactttaatgtgtatatgggtcacttcttaaaatgcagattgaatccttaggcctggagtggggcctgagctctgcatttctaaaaagctcccaaatgaaaccaatgctactgatgtgaacaccacattgaatagagggcttaataccatgcttctaagatagtaacttccaagacagcaaagatttgctatccacacactaaaaatacacagttgctctaattgttggctgcttatgctagaatgctctattcacacctgccctggctaactccctttcatgacagcattagtagttaaaatgaccaggatgttatgttccagccaggtggcctttaacaaggtacttaacctctctaaggttcagtttcttcaactgtaaaataatgtgacaaccaagagaatggtctcaagtagcatttagtcaataactagaatttagacatgcagtgattatatcagaataccttagatgacaataaagaatcatactctgataggctacaagtcaacaagatgaaatagaagcagtataaaagggaagttctgcatttggtgtttttaaaaagaaacaacatagggagaacccaacagcatgatgaaaataagaactgaaggattttagttgacataatgcttccagcaagtcaacaatgtgatcctcttccccactcccacccccaaaagtaatataaacttaagttgaattaacagaggtgtatgaccacatgaagaaaagaaaggacctctggcccactgtactctgaccacacctgaaggcctgtgtttagttcttggctgaactgcataaagtacaactgccaaatatccaaaggagggaacctcaactcatgagaactctggacaccatggcacaatggcagagggtagttgagaaaaatagatggaagagagatgttatagtggcacctactggctatcaatgaagcaggccaagtggtagaaagtgtctcttccaccaggtggaaagcagctagtagtgacagctgctctcagcttcagcccagttgttgacttgggagaattaagatctatggttactagatcttccagatttgaaagagtagctggaaatctgcatttgttatatacaactttctgatctttaaatgttggcaagtattaaaaaaactaaaatcttctgcagactgaataaaacacccaaaaggggctaatttgcagtctctcttgaatgtaaatatctggaaggctgttgtcctcaagagggtatagaatggttctagcttcatccagggacaaacagactggggctacaaggaggtacattatatcacaatataaggaagaactttctaatatctggctaacaatcgaatcagctgtccctgacagagtaacacgggctcaatggaaacctccagagtgtagatgaccatctctcggcaacgttgtgggtaagattaaacttgttggtggctaaggcttccaacactgagtctgtaaatctacatacatacaatattcgttgaagtctacttttcttaaaagtctgttctttggattattaaatggataaaaagccagaaaaggtgcaaacggtcctgcaggcaacataagacgtatgtgcttcgtgagtcaattgttattggacacagaaaagtgactttgagagaagtttgaaacattttcctctcaaacttttttttttttttaaaggttcattattgctttctacctgcttaagacaaagcaggggtgtgagttcaaggtgggttggttttttttgttttttttgttttttttttttaaccattaaaagggaattgctttgtggttataatatgtttcttgcaacttagtaagccttaacatgaaagtgtctgctgaacgacctgaatggtaaatatatatatataaatgagttaatgcatatgaagcatttagcactgttcctggcaaataagaggccttaaataaaagacagcaactctaagactcaggtaagatcacctccttcaaataaccccagaaacaccttccttacagataccctcttttaatttcagcccatggcttatgctactacatttacagattgtgagttcttagggaccagaaacctggtgagatgggaagggtggtaaaagacaaggtcagaaaaggcagggccagatcgtataaggctttagtccaagaaaaaagactggattttattctgcatggaatggaaagccattgaaaggttctaagcaagaaagtaaagtgttctgatttatatttttaaaagattaagctggtttctgtgtagaaagctgttttgcttggtttgggttggggtggagatgggggcaggaaggtaaaagtggaagcacagataaccagggagtagattactgcagtgttacaagttagagatgagggtgtcttgtattaagacggtgataacaaaaagaagtggagagattccaaatacatttttgccaatgtgaaactaagaaatctattatataataaagtatacacatgcttaggattataaaaattaaacttactttagatacttggcatattctgggtctttccagtaaagcaagtatttaagataattaacaaaagctttgtctttgaagtaacctctttgggcaagaactgaaaagcattaaaaaaaaaaatctgtaggtcaaaccaatccttaaactgtgatttgttacccctaatataaaggatctatttacataacacccccaccaccaacacacattggattcaaaacacaagtcccagtacgcaattatatctatataccagcataagtgtaatgtcattcaactgagaatgtgtaaaagtagatactattttgaactgcaactcttctgtcagaaatcattaatagctactcaatttaatgaggtgcttaacaacttacaattaaggtaatttgggttggctaaacattgcacaaattccaactccaactgaaaccgaagtcgatttccagcatcatctaggagacaagacagcaaaaatcatggaaaacaaaggtcactgtatataatactgatttgtagtaaggaaagagcaataaagaaacctgactaatgttgagatggtcttcctaaactaggagtgggaggagataaaccttccttcgaaatctaagaaaagcggagccctgattaaaaggagtaagttagaagtttctctaaagttaaagagaaatcatcaaagaaaacagcaacacaaacggagaattcctaccactcgtgggccactatgtaggaattttaacagtgatcactaaggtaggctgtaataactgtggcttcccctattttaataatgcgttgtaacaactgttaacagtgattaagtttcgcaaacgctaggggctgaatcagtaaagaaaaacttaggatgcaagagactgcggagagcctaaaagatcatgcagcgcatgcatataagaagcaccagggtcaggagatcgagaccatcctggctaacacagtgaaaccccgtctctactaaaaatacaaaaaaaattagccgggagcggtggcgggctcctgtagtcccagctacttgagaggctgaggcaggagaatggcgtgaacccaggaggcggagcttgcagtgagccgagatcgcgccactgcaccccagcctgggcgacagagccagacgctgtctcaaaaaaaaaaaaaaaaagaagcaccagtagcagaatgatacacaagtctggcgacgatatttcaaacttaggcaagctcatgtgagaagcagaaaaccaatcaaggaggacacggtttaacacacaagtcctctcccttagtctcacccacgccagggagctggtggggtggtgtctgaatagcaaagatgtgcgaacaaaccaaatcaggaaaactgcaaagagtaccttagtctttctagacgctacaagagccttctctcctctctgtccaaatattaaccctgccaagagtaaggcctggaaggaggccacggggaagaggtctgggtcaaggagagttccatctgcgaagactccaagatcagagagctactcacctgtctccatagcgacagcagcggccataacaaacgaagacaccaaaacgccaccagcctgacagagcaaaagcccagagacgcgggcgaagttccggaaaccacggctccctcttccggtcccggggcactgtgggatatggggcggggcggctccgcccatccccgaccagccctgggatggctccacccgcgctggctccaaaatagcgagggggcggggcccgggccgtgggagcgcctgaggggcaggagtccagtgttttagccttcgaaggaccatggtgcttccacgtcatcgtgttgtggcgctcccggctatggcagtaccgtagttttcctctcttctgcctgcggtgaccattgggctgtagggtgccccgaggcctccctggccccctcacgccggcagaatggcctcagcccgaggggccaagcagtcttcgccccgggtggggaccacccgctacacagagacgtccacggtccgcgtggagacctcgtcccaccgcgtggagacgtcgtcccggcgggtggagacctcccagcgccgcagcgaggggccctccctctccccctcggggaagcggctccctcgcatcctcgaggcgtcctcccggcacgtggaatcctcctcgcagcgcacggaaacgacctcccgccacgtcagagcctcgtccctgagggtggagacgtctctgcactgcgcggagagcccgaccccgcgggccaagccggccgcccgccagaacgaaaaaacggcccgatgagatgctgcttcccaaaggccaccaaggggccagggccctcagccaggacagaaaggcctccagttgccagccagccagccagctgccaggtggaccaatcattttcggtttcatggaaacaaaccataaatcaatgtaagaaacagccaagccgcagtttctgaacacagccaacgtttactgaccgtcctgcgtcttggaccagcctacttttgacccagtgaactattttcacttgaagccagcacagaaggttttcaggcccaggatgctgtctaaatcgggttgatggacaaagagaggctgtttgagcctctgagccaggtgagtttgggatccacagccctcagaaaaccttcaccccttaggaacagagaccaaactgaaataatgacctgtggaatgattccatgcctgctaaaaactcgagggacaaggaacagactcataaattattaattggcctttgtttatgtttcaaagtaaatggtcgttttctttatgctaagtctttgtacctggcacccccatccatacacttttttaaggtaggttagatgtggttaaaaatgacagtaaacccaccagcaagcaaaaataatcttagaaagtgagaggaggtcactgaaacctggcctgaggtttgaagaagatggagaagagttatatttattgagaaccggctctgtgccaggcactagatgttcctccacttacgatggggttacctcccgttgaaactattgtaagttgaaaatatggtaatttgaaaatgcacttaatacccctaacctactaaacatcatggcttagcctagcctaccttaaacatgctcagaacacctaaagttgagcaaaatcatctaacagaaagcctgttttataataaaatgttgaatatctcatgtaatttattgcatactgtactaaaagtgaaaaagaatggttgtaagagtacttaaagtactatttctactgaatgtcacttttgtaccattgtaaagtcgaaaaatcataagtcaaaccatcttaagttgggaactgtctgtattctgggaacttgggctatagcagtaaaaaaggcaaagtcccagctctagtggagcttacactctggtgaaaaggcagacaagcaatgatgaaacaagacaattttctattgtgattagcactatgaaggaaatacatgggtaatgtgatagagaatggaagtaagtggcttcttttgataaaatggtcagggaaggccttgctgattagttaacatgtaatctgagatatgtgtgaatgaacagtgatctggaacaggtgcattctaggcagaagaacagcaaatacaaagggtggatgggaaccagctttgaatgttcaaggaacagaaagaaggccagtgtggctggagtgagagagaagcaattatatagacatggaagcagaacggaagagaggagttaaaagcaagcaggggccagtccacagaaggtcttctaagccacagtaaggaatttgagattattctaaggtcaacaggaaaacattgaagggtttccaacaggggaacgacatgatgccatttacatttaaaaaatatccttttggcttctgtgtgtagaatgtgggacagtggttctcaactaagtgtgattttgtcccccagaggatatatggcaacctctagagacattttagtttggttgaaaagttgttgggagggggtgggtggcacattaggtgctactggcacctagcgggtagagtccggggatgccacctgacatcctacagtgcacaggtcaacaccctcccctctgccaacgatgaagaatcactggtcccaaaatgtcaatagtgccaaggctgagaaacactgacagttctagcagcttggaaagctagagcatggtctactgggacagcgcaccactttaaggaacagtcatggaagagggttacctttaaaagtaaagagaaatcatcaaagaaaacagcaacacaaatgagacacaatacctaccactcatgggccactatgtaggaattttaacagtgatctctaaggtaggctgtaataactgtggcttcccctattttaataatgcattgtaacaattgttaacagtgattaagtttcgcaaaagcacgtgctgaatcagttaagaaaaacttaggatgcaagctgaacaagagactccagagagcctaaaagatgatggaacatatgcatatataagaatcacaagtaacacaatgatacacaggtctggcgacgatatttcaaacgtatgcaagctcatgtgagaagcagaaaaccaatcaaggacacgctttaagacacaaggaggacacgctttaagacacaagtcctctcccttagtctcgcccacgctgggaagctggtggggtcgtgtttgaatagcaaaggtgtgcgaacaaaccaaattaggaaaactgcagagtaccttagcctttctagacgctgcaagagccttctctcctccctgtccaaatactaatcctgccgggagtgaggcctggaaggaggcccaggggaagcgggagaagaggtctgggccaaggagagttctatctgcgaagactccaggctcagagcgctactcacctgtctccagggcgacggcagcggccataacaggcaaagacagcgaatcgccacctgcctaacagaggaaaagcccggaggggcgggaggagttccggaaaccacggctccctcttgcggtcccggggcaccgaggaatatggggacggtggctccgctcatccccggccaggcccgcttagcccgcgctggctccggaatggcgagggggcggtgccgggctgtgggagcgcctgaggggcaggagtccagggaggcagacttttaccctcaaaaggaatgagtcccagagcctggcacaaggaagacaagtgtgcaaagttggtggaatgaattcggtggcctaaatgtaccttcctcaaatgccacggctgactgggtctcctcgcccacttcaccctctcttgcaatccaacttgtgaggcgtgtgtgtgtgtgtgcatgtccgcgcttgcctttagatggaggttggcttcccagccatccaggcttgcatacacgtgcataactcctacccctacctcgcctgcctgctgtaccaggggttgattccttcttcctgcgtgttttctgtccaaatccttttctgatttggacagaaaacacgcaggtggcacacagtaagcgcttaataaattttccggctacctgatcttcttggaattgagggcatgctcctgtgcgcccctcattgcacagagctcccttgtctggaaactcagcagtcaccggagccgccgtcggtcctctcgctttctctattttaaaaaacgtttcaaccgctagcgctgttggatctctacctttcaggctttatcacctggggtggagtgggtggtgagagggaagggatggggagtcaagacaggagaacgctctcgatttcccgacccacctcccgtcatatctcatgtcatatctaccgggtgttctacccggtcctgttactttttttcttccgcgaaagcccaaattcccatcactgctctagctctctcccagatcgccaaatccggatgtctgtctcagggaacgtcaaagcaacatgcccggatgaggtcctcccctctccccacctcccagccctctcctcctgcctcccccggtgtcacccgcgcctccttcctctcttcacctccctctaaacaagaatccggcgcagtcagttctagaccctgagcatctcccgcgtccctgcccaatatccgtcccgcccccgatcgcccgcgtcctcttgaacctgcggagccctgctccccgcactccacgcccttgctccgagcttccgagaaagcggggcaaagggagccagaaagagagaaaatgcgcacggagcaggtggccccgcgactccatggtgaggggacggggcacggaaggtggaaaggcgcgctccctcctcccttttttcctccctatggtgggcagttggtgacacacagtaaacgctcaataaatgtttccgctactcgatctccttggaattaaggggatgctcctgagcgcccctcattccacacagctctggtgcctggaaactgcggtcgccggagcggtcgtcggtcctcccggtttctctattttaaaagccatttcaaacctccagcggcctcgccacctctgctgcagaccttccaagcccttctgaagccggaatgatttctccctaattcactccccctgcttaacacattcgaacggctcccgcttgttctcgggaccaaatccaaagcccctggcgccaccttcgagagcctccggacctgctgaccccccacacctgggctctgagctccagatccaagatgctgctcgccctcccttccccgccgctctctttctgcgcgcctttcccctgccttccctttctgtcactctccctggctgagccctctccgcctccaggtctccgggaaggttgtccccaggccggtggggcccctgcaggtcctcagcctcgggcggggtggggtggaggggtcgcacagcgggaattgccaccagcgcgtccgggctccacagcgcgctcgtccagggcgcggcagcgctcagcccagcgcttggcacagtcagtgaccacagggaggagaaagtgaaggcaggagcgcaccttcccacctgccgtccccgtcccctcagaaccgagtcctggggccacctgctcggcgcggtccctctctctctggctcagtccccccaccccgatacgtctcctcctctcagaggctccgaggaagggcgtgggcgctggagggagcagggctcagccgggtgcccctcccgccaggccccaccggggctgagcctcttctgtcgcccgcaggagacagaactcaaggtggaagtaccggagtacctggggccgctgatgtttgtgaaactgcgcaaacgtcacttccttcaggttctgcagctggatctccgtgtagggccccggagccggggacgaggtcaggttcccttgttaccgctgggtggaggtcgacggcgtcctgagcctgcctgaaggcaccagtaagcgcggggctgggggtgtcaggaggcctctggggtgcgagagaagctggggggatgcgcgtgtggagaagagggcgcaggatgggggtgctggaacctggagcgcagggctctttgggagtgtcgaaggggctgtggctgcagctggcacaaagtggctggagcctgggggaggggcgtgatgctgaagaggcaggggtcacacagaaggacggagtgatgaggctctcctggcaggggcgagaagaggcgctcaccaaaagtcactggccaagccctcctctggccttctaggccgtactgtgggcgacgaccctcgaggcctgttccagaaacaccaggaagaggagctggaagagagaaggaagttgtaccggtgagccctcctcccctgaccccacgtgagctgctgatgcttccagcacccacgcctgatttccttcctgccctacaggtggggaaacttgaaggatgggttaattctgaatgtggctggggcaaaactatgtgacctccctgtggatgagcaatttctggaagacaagagtgttgactttaaggtttcgctggccaaagggtgagagcaaggggaggctgggtgagagggaggtgtcctggtctagtggaagccaaggggcttatgggctgcactgcactgcactggaccggctcaaggtcggtgcctgtggctgtcatgttggagtctcagaatgatgctcaaaccctttgccccattctgtcctgaaggctggccgacctcactatcaaaaactaaatgttctgacgctgggcatggtggctcacgcctataatcccagcactttgggagactgaggcgggcagatcacgaggtcaagagatcgagaccatcctggccaatatggtgaaaccctgtctctactaaaaatacaaaaattagctgggcgtggtggcacgcgcctgtagtcccagttacttgggtggctaaggcacaagaattgcttgaacccaggaggtggaggttgcaatgagccaagattgcaccactgcactccagcctggtgacagagtgagactccatctcaaaaataaaataatgttccgacttgctagaatgatctgaatgacttcaaccagattttctgctgtggccagagcaagctggctggtcagtcccccaccccaatatgtctcccaggacgcttacccccagatcccacccaacccaggggaattgaaagaagcagggtggggagaccagagacttgggtccctctggtgggctggagtcaagggggcatggttggtggggttggaaggaccaagagctcagatcccacaacttgctcaacaactgccttccccagagcgcgtgcgggactcctggaaggaagatgccttatttgggtaccagtttcttaatggcgccaaccccgtggtgctgaggcgctctgctcaccttcctgctcgcctagtgttccctccaggcatggaggaactgcaggcccagctggagaaggagctggaggtatggacatcagagccctgaggaagctcagcagtgaagtggggtggcctagtgccaatgatgctgctgcgggacccactgtgggcctggcttgctgccagccagcaaggacggattctgcaggagaggtcctgagggaccctggagaagctcagctgctcggcctccttcccacacgagagtagctgtggagggagggcgtgcaagatggaatggttgatagaaacagggtcaaatgaagaaatgtgactggcccctggtgctagggattcggggagtgtgcagagtaagagagtcaggatcagagtgctgtggctgttcatcaggaggcgatatggaacaacagagaggaaattcatgggattaagggcagataggcttggatgtgaatcctggttctgctatttgtaagctgtgtgacctcaggcaaaatacccagcctctctgattatctgtttcctcttctgtgcaactgaggctcgttcaactaggtataaaaattataaggctgggcacagtggcttgcacctgtaattccagcactttgggaggtcgaggcaggaggatcacctgagcccaatagttggagaccagcctaggcaacgtggtgaaaccctgcctctacaaaaatacaaaaattagcacctgtaacttttggtgtagtggcatgcacctgtagtcccagctatttgggaggctgaggtgggaggatcacctgggcccaaggaagtcaaggctgcagtgagccatggtggtcccgccatggcactccagcctgggcaacagagtaataccctggctcaaaaaataaacaatgatatgaggcaataagcacatgatccattacctggtacaaagtaggtgatggagacaagttagcttctctctctctctctctctctctctctctctctctctcctctctctctctctcttcccccttggaggaatccgagtgggaagaagatgctttatgttgatagcagcctttgacctcttcctgcacccagggaggcacattgttcgaagctgacttctccctgctggatgggatcaaggccaacgtcagtctctgtagccagcagcacctggctgcccctctggtcatgctgaaactgcagcctgatgggaaactcttgcccatggtcatccaggtgagaggactcaggatttctgctcccagtctccagccttctcagctcagccccttatcgaaatgcactaagcaccatcttcaaaggcgctgggctaaggcaccagggagacgcgaaaggaggaaatgcgccaagtctctattcgaaggccttgcaatgtagctggagagacacatagggctagtctgcagaagctccgggactgaggaagtcccggaggacagagacagcccaggagggatcggggagttgggatgtcaccagccttggaggagggccaggtctcagacaagcaggagggagaggaaggaccagtcctcaggggcaagacagactgggcagaggctaaggtagaggagtcaggagattcctaggggacagttggactggggccagactaagccaggctaaggagcatgaagtgggaagctggagaaggctgtgatgaaacatgctataggcacgcggtgtgggcagtggtgtttagggtgggttggagaggggagatgctagaaacagggactggggcaacatgccccagcactgaccccaggaggaggggagctcggatatgggtagtgaccgtcgggatggagaggaccggtggatgcgagtgcagagggagatgaaggagaggggaaaggggagccaggccaggtgcctgcagaaatagcaccaataaagagaacagggtgcccaggtagacttttgtctggccaatgttgaggtaacgggaagacatttaaattgtccagcaggcagctgagaacaagagattcagtcatttgtgtagaggtggggccaaaagatgagatttcgaaaaacagtgtgggatggaggaagcaggtggtttgaatcttgtccacaatgcggggactgaaaggggaagtggaggctggaggaggcaccagaagagcagtttctgcagaatgctggaggcaaagcagcttgcagggtgctaatgcactgagctggtaggaaggggaggggaggaaatgggagctgtagggagaggcaggagtgggatggggaaagcagaacaggtttggaggacgaggttaacatgcaaggggggcgggaatcgctgagtgccgggcactcatgccttctctccccacacttgtccctgctccagctccagctgcccagcacaggatccccaccacctccccttttcctgcccacggatcccccagtggtctggcttctggcccaatgctgggtgcgcagctctgacttccagctccgtgagctgcagtctcatcttctgaggggacacttgatggctcaggtcattgttgtggccaccatgaggtgcctgccgtcgatacatcctatcttcaaggtaacaccttatccccttctctcctgtattcagctgaatacttgatggggacctttgtttctctagagttctctttctgtacaacaccctcaatttcagcatgctgccctgtgaattctggctgtattggcctcccagtactgccagctctctctgtccccttaactcaggaagatgataggactctgccagggttgctcctccctactctgcagctggaaagctttctccaggcagtaagctggggcaattgtggggcccacttgtgtctgtttcttcagttatttcaggcaagagggtaaatccagttccttacttcactccagctggaggtctcctcctcattattttatatacgttttgtggaagattaactttacaatttagtttttaggtaacagaatattcagacaggactgcgactccattcatggagtaattatcgtagctcagagatgaatattattactctctcccagagacggatgcagtgacttttgggactttgtgtgtctcttttctcaaggagagactaatagcatctttatttctatgaagaatagttgcattgtgttagatagaaaagaatattttattttattttattttattttattttattttattttattttattttattttattttatttttgagacagtctcactctgtcagccaggctggagtgcagtggcacaaccttggctcactgcaacctctgtctcccaggctcaagcaattgtcctacctcagcctcccaagtagttgggattacaggcgtgtgctaccatgtcttgaactcctgacctcaggtaatctgcctgcctcagcctcccaaagtgctgggattacaggtgtgagccaccacgcctggcccattttttcttttgagtatggaagtttaaatataaatgctgattaaccaatagaactgactgtgggagttaggcttcgcccttggctccaaccctctaccttctaaagtcagcttcctgtctaaggctaggtctctgcaaaccatattcctgccttcttacctggctccatgtcgagctcacaccagtaactaattcaccctggtagcagatgttccttcccttagtggcagctgaatccacgttgcaactttctaatgtttgaaaaagctgctttattgcatccctgctcagaataccagcaccagccaactggcaccccttatcaaaagtctgagtttcagatctccagggtccctcctccaagtttctgaagttttaataattccaggttctgttctttcctgtctactggtagggtagagcatcctttcatacgcttattacccctgtgggtttctttttctgtgacttctctattcatatctttgctcgttttgcttctttcacgtctttttcttacttgagtcctttaaatattctgaagacaaattctcacttatttgcattgcaaccatattctcaaagtttttggcttgcccccatcctttaattttttttttaatttcagaagacagtttctcagctttcaccatgtgcctttatctttcctggtttccatctctgattttattttataatggcaacaatgtgtttctgtcttaataaagtggtccaccaggattgctatcccagtggtttttaaactgcagtcaaaacattaaagactggcgaaatcaatttagggggtcccagtcagcattttaaaaaatgaaatagagtagaataaaacatatcagtagagcaatatcagaatacatcacactgtttaataggaaggaaggaaggaaagaggaaagggtaagaaaggaggtgggtttggacaatttattttattatttatttatttatttttgagacagagagtcggtctatcacccaggctggagtacggtgcccagcgtctgcctcccgggttcaagcgattctcttgcctcagcctcccgagtagctgagattacaggtgcccaacacgcccggctaatttttatatttttagtagagacagggtttcaccatgttggccaggctggtcttgaactcccgacctcaggtgatccgccctcctcggcctcccaaagtgctaggattacaggcatgagccaccgcgcctggccaggtttggacaatttagttatgacccagtgtcaaagtttttattacaatgttgcggcaagaaatgaggcttttgctaagtcaattcaacaagtgtctataggtaaggacactttacaggaaaagagaatgactagataatcattgttagactggatacaagaaaaagaaagaaaagttctagttaaggattattagatttattaaaagacagttaaaggcccttggattccttccctccagggttgatattagctgtgtacataggtaactggtttctaacaagaggtcataatctcattaaaattcatcagaaagtggcttaagcatttaatcaggcatacaattgatttccaagaagagttttgtggcttatattcccaaaacatccttgtcccagccagcgtgtgggacaatcttttattttacagtgtatatattttatgaaaacttgtatttcactacatatgtaccatatcttgaagcaaactttatttttgactgtgtcactgtcaatgaggtttgaaaaacactgctgttcttaagagctgagatccaatcaaggcctcaggaattcctggggtccctaaacctgtccttgcctgtagtaaacctctctatctctgcaggcacctaggggaggttctcctggatgtcttcacagacatcctgcatagctgttaaactcagaagtctatccatcccacgtctgctttttgccatataagatttcatttgcaaaagggtcccaatgctaatgatctttgaacatcatcaagctaatgtaatcccattgttttactttgaggaaactgaggctcggagtgagaacaccttgccagtcgcatggcatttggtccacctgcagttgtactgcccccaccagtctaccagagtagcaaagatttcaccagtaggaactcatgtatttagtgttaatggcctgtccacatttccctttaaaaagaccaggagaggctggacatggtgggttatgcctgtaatcccagcactttgggaggccgaggcaggtggatcacaaggtcaagagatggagaccatcctggccaacatggtgaaaccccgtctctcctaaaaatacaaaaattagctgggcgtggtggcacatgcctgtagtaccagctacttgggaggctgaggcaggagaatcacttgaacccgggaggcagaggttgcagtaggccaagatcgcaccactgcactccaggctggtgacagagcaagactccatctcaaaaaaaaaaaaaaaaaaagaccaggagataagggctaagtaattaaatttctccttagtgtatattcattgatcagatttttttttaccaaggctacttcacccattagtcatgatagggtatagtcctaaggcctgtgaattgttcaagggcctacaaaaatggctgaggcccaaaaaactcgttgccttcaaaatacaaaaagaaaacaaaattgaaattaataagtgatatagtttggatacttgttccttcaatctcctgttgaaatttgatccctggtgttcgagatgggacctagtgggaggtatttggaccatgggggcggatccctcatgaatggcttagtgccattcctgcagaattgagttctcactcctggttccagcgggggatatcgctgctaaaaacagtctggcagctcccctctctcttgctcttttgctctctccctgtgatgcctgctctccttcaccttccatcatgagtagaagtcccctgaagccctcgccagaagcagaggctggtaccatgcttcttgtacagcctgtagaattgtgaaccagataaatctgttttctttacaaataacccagccttgtatgttcctttatagcaatgcaaaatggactaaaacagtaagtcccaatgtgcataaattttagtatgtatcatatgatatggatcaggatctccaaaaataagaatgtgtatggtctaggaaggtctcaaaatggctctttcaaggtgtctatacactgatatccaggctccaaggagatgatagtgtggagccttctctctaaaagtcctaagactgatagattcagcacagtatttggcccggagtggcctgagacaatacatttctttcttttaattttattttttttgagatggagtcttgctttgtcaccgaggctggagtgcaatggcaccatctcggctcactgcaacctcctactcctgggttcaagagattctcttgcctcagcctcctgagtagctgggattacaggcacgcaccattacacccagctaatttttctttttgttttggtatttttagtagaaacgggttttcacagtgttggccaggctggtctcaaactcctgacctcgggtgatccgcctgcctctgcctcccaaagtgctgggattacaggcataagccaccgcccctgccccaaagtgttgggattacaggcgtgagccacggtgcctggctggtaaacattatttcgtgaaacttttttgtttggaatcgcagtgtaaaatatatttctgggagtcatggtcaaaagagttggagaaaagtgcgtctctaagttttctcccaattagtgccccctcttgagttcctggccatctgttaaatgtgtgccatgacagacgatggacagtagagggcagacaatccccgcacagcagcaaaggctggacttcggaggagttggaaaccacaggcgaatgccaagcaggacagaagcctgaagccaggcctgaagcttctgaaagagacagggcacacgtacctggtcctcctaggcatcgcagcactctctgtgtgatataactgcagccactttccagtctccatccacaggctggatccttgtctttggatatttttcacctccctgggagtacttccaggtgtctagttacttttaaaccaaggtcctgtaaaaccatctttgttccgtcacccaggctggagtgcaatggtgcgacctcagctcactgaaacttccacctcccagattcaagcgattctcctgcctcagcctcctcgagtagctgggactacaggtgcgagccaccacgcccggctaatttttgtatttttaggagagacagggtttcgccatgttgtctccaactcctgacctcagatgattctcctgcctcagcctcccaaagtgcaaagggattacagatgtgagtcactgcacctggcctggcactttaatatcgtagagcagagaacacacactgagctctcagtctcccccaggcactgtttgcagcactctacatgtactaactcatgcactcctcacacctaggtgaagtaggtcaggacactgaggattgagaagcttaggtgacttacccagcattcctggctaggaagaagcagagccaggatccaaacccaggctagctggctccggagcttatgctctcaaccagcagccgctgttggtacaagaggaataaatgcctagtcttctacctactgtatctactcctaaggatactgagggtgtgatgtggtcgggagaaaccctggaggccatcagaagagcaggggatattcaagcctaagatgggaagaatgggtagacaccacttcattctgctatctgaagggctgtctttgtcagaggcagcctcaagagcagaactagaatcaaacggtgaaaagctaggaggatttgggctcagaaaaaaaaaaaagaaagactttaaaaaatgtattataaaatctggccgggcgtggtggctcacgcctgtaatcccagcaatttgggaggccaagatgggtgaatcacgaggtcaggagttcaagaccagcctggacaagatggtgaaaccccgtgtctactaaaaatacaaaaattagccgggtacagtggcagctgcctgtaatcccagctgcttgggaggctgaggcaggagaatcgcttgaacccaggggacggaggttgcagtgagccgagatcgcaccactgcactccagcctgggcaacagagtgagacttcgtcttaaaaaaaaaaaaaaactttattctacagacaaacataggaagccccattgaaaccccaacactgtgccacgtctgtgtcagatctccagggaaaacatttctcacagttgagccagccctgtggcggtgagcactctgtcttctaaagcaagagcagacaaacgctgggcaaccactgtgggggaaggtgccacagagggcatttagcttggcgtcagacaggaagcctggggggtcccaggtagcccgagtttgagggggtgggaaggaagcagtgggaagtccctgggttacatcttcctccttgaagtctttagcttttccctctcctcctggtcccttgcctaggtcaacaaaaatgtctcatctccccctgccctaactggactcccatttctctgcctcttgcccacccctgcacaccctaagccattattcattttatttcccaggctcttcaaagagctctctaccctcgctgctcacacgtccccgtcctgatcgtttttccctgcccttgcactgcaacctcaccaaatctgtccttcccaatgtaacttcgtgctgtttccccttcccaatccaatggcttcttctcgacccccaatttctctgacctttccgtagcatttggctctggggacaattccctcctcatcaaaactttttcctctgttgttctccgtaagcctgaactctctctccccctccccccacacccggcaaatgtcagtggtccccagaattctttcctccgccttagcttctcactttgcacactgccccggcgctcacatggcaaccgctgcctgactgcggatgtctctctcgcccaggcctccgtcctgagcaccaacctctcacaggctgggaatcttgttctggattaattagtttcatttttgttgttgttgttgttttgagatggagtctcgcacagttgcttgggctggcgtgcaatggcgtgatctcgctcgctgcaacctccgcctcccggattcatgcgattctcctgcctcagcctcctgagtagctgggattacaggtgcacaccaccatatcaggctaattttttgtatttttagtagagacagggtttcaccatattggccagactggtctcgaacttctgacctcgtgatccgcccaccttggcctcccaaagtgctgggattacaggtatgagccaccacgcctggtcaaccttttctatttctctatagcgcctactaaaatgggacttgatattatttattcattgcttaattgtttatgatctatgttccccacgggagagcaaggactttgacttgtttactcctatatccccaaacctagaacagcgtctggcacagagccagcatgcagtaagtgttggtggaaggaataaatgaaggaatgaaggaatggtcgggatgaatttcttgcctgtggttcactgatgagaagctggggaaggctgaagcaaactcacacgtgcccctgacctcggttgctccttctgtcagataaactcctgtttgtcctcaaattcctgctccatttccacctccccaaggagacttgcctagtccttgactctgagcccacttcctgggtgttctcgctccccaccgctgctgcctgtttttacagcatccatgtggtcactccgtgaatgattctttgttgtttcctcctgtctctcccgtgagattgaaagcacatcaagggcaggcctgtcacaaagcctctttgtgttctgtagctatgcgtggagcgaatgaacaaggttgggcttgtctggacctgggcacggtcactgaatgttcttggcctctgtaaggaagggcatccccttggcagttagcagggcaggcacaaggggcatagcatccccagaacatgatgaagggcacctttgaaaagctagagaggctttggatagagctggaattgtctggtgacatgtgctcattcatactacatggtcattatactacgtggtcttagaatatgtcaaattctcaccttttcatccacccacaattcactgagttcccgttcagtgccagcttctgtgatgggtaatagtggtgggaaacatgcagaactggatgatcaagtttagaatgagatcgtgcctactgtcggagcagtccaggaggggtgaccccaggatcccttcttcctttgccttccatctattctaaattgtcttcagctggtgatgcaccagctgggcatccagacgtcagctggcttaaacagaccgctgtgcttgcaacaagcaagacacttcagaacttgcagaatcactgcatccctttcttaaaccaagacccaaccccaccatctctttcttttcctttctggtttggcctctgtaggtgtgacatcagagacacacctcagcggatgtgactcagtgagcaccattcagactccccagggccactcccatgagctggccaggtgggcaggctttgctgagcctgtctccccaccggtctgaggtctgcagattaggcttccagacagggagcggcagggcaggcccctcagtgggaagacaggagtgtctgtatggccagccgggaatcaagaaccattcaccctccaccagcaagggtggggctgccctgagctttcaggcagctgttttatggaattattaattttaatgtacagatggttttattttctgctcattttcacatattctaagaacccttaaatgttatactatatagtctttttttttttttttttttttgagacagagtctttgtcacccaggctggagtgcagtgacgcaatctcagctcactgcaacctccacctcccgggttcaagcaattctcctgcctcagcctcctgagtagctgggattacaggtgcctgccaccacatctggctaatttttgtatttttagtagagacggggttttgccatgttggccaggttggtctcgaacccttgacttcaggtgatccacccacctcggcctcccaaagtgccaggattacaggctcaagccaccgcgcccagcctatagtcttaatattccctattttaaaaaatattcatggcggccatactagagcccccgggatatagcggagagcactgccctcatggtctttagatacacgtctttcatggttctgttgaatgacttccttacaacacattcccaggagcagaattaccacattaaaaggtatgaacatttttatagctctggaagcgtattgcccaatttctcccctaaaaaggtggtgttaatttacactgccactggcagtgtgtgtaagctggtttcagcacagcttcaacagcatgagacattataattttgttaatgtttgctaatttcataggtgtgaaatgaatggcacatcagggggactttaatttgcgttccctggtgatcgtgagggtgagcctgtttggaggtgctgatgtgcacagtctgcctagtgggggcctctccgccctgtctcaggcactgtctgtttctcagcctgtgtctccccacacctctgcctgcctcccgccgactgctgttcttactgtccctctaagcctgtctgtctcagtgtcttagcctctgattcctctgagtttctctggttcctaactggccaggtgtggagctggttcatggaggtcctagccaagccctgacaagctgcagtctagaggcggggcgcagggttctgggcacagggctccaggctcctgcctccaagggctccctccccggggagctccctttgtgaactcacatggtgccctgcccttccttccaccagggcctcaccaaaggcccctttcatttctccaggtagcctcagctgggctgacctgctcgattggatccagtgattctgagatcccagaagtagctgggagtgagcaggctgtccctcagtgactccctcttaggaagtgttccagaagccccaccctcaggacaactcaccagacagtgttgtgtgtcctggccgttgggggtgtgtggtctgaaagagccagaaagtggtgtccccaaagtccagatgtgtggacagtagacaggtccacagaggtgacaatggcgccgcctgcctaccttctccaacgagccccttacctgaagtggcagaaagagctcacctctcaggccaaaccccacttggcaccaggtggacggggggccaccgaggccccatggtttagcagggtcagagtggggctgtcaccctgcccactttcaatggcgtggaagagtcttcaacacttgggaaagtttcagaaagactctagagaggcagctggcttcaagggaaggctgtgtggatgtacttggcgaatcctcatgatcagtgagttgctgactccgggctctggacctgccctgtggctgcttgtctttgaggcaggtcttgagggctctctgcagtcacctctcaggccctgtgggtggtcccagcctattagaatcgtagattgataccagccagaagggaactctgacatcaagttctctctcttttttttttttttttttttttttgagacggagtctctctgtgtcgcccaggctggagtgcagtggcgtgatctcggctcactgcaacctccaccttccgggttccagcgattcttctgcctcagctgcccgagtagctgggactacaggcgtgcaccaccatgcccggctaatttttgtatgttttagtggagatgggatttcaccatgttggccaggctgatctcaaactcctgacctcatgatccacctgcctcggcctcctaaagtgctgggattacaggcatgagccaccacgcccggccctaccctctcattttatttaacattttaacgttaagcttttaaaaaattatacaaataatgcatgcctgtttctaggatatttggaaaatacagaaaactataaaggagaaaatattaatccttctatccgttcatcaaagataactgctattctatttcaatatcaaccttttctgtgctcgcatatttttattatcactacgaccatacattatacgtgatttatttacctccgattatatgcattttcaatataacgaaatattctttaaaaacactgttaatgactgcataatagtcttttgagctgacacaccttaactaatattacctaaatgtcaggcatgtatgttttcagtttttcaaggatataaaaatataccaaagtaaacatcttgggacaggcgtcatggcttacacctgtaatcccagcattttgggaggccaaggtgggcagatcacttgaggtcaggagtttcagatcagcctggccaacacggtgaaaccccgtctctactgaaaatacaaaaattagctgggcatggtggcaggtgcctgtaatcccagcaactcaggaggctgaggcaggagaattgcttgaactgggaggggtggaggggttgcagtgggctgagatcacgccactgcacaccacagcctgggggacagagtgagactccatctcaaaaaaaaaaaatactgggtgtggtggctgacgcctgtagtcccagctacctggggactggagtgggggaggctgaggtgggaggatcacttgagcccaggaggcagaggttgcagtgagccaagatcgccccactgcactccagcttgggagacagagtgagactccgtctcaaaaacaaaacaaaaaatactaaagtaagcatctttatgcataaatttttgtccacaatttcatttttcccttagcttagattcctactcatagggtataggcatgttttaagatttcgcatgtgtatttttattttacttttgagaaaggttgaactaacacatgcccatctcgccacacaccatcaactacaccaagaaatatcattcaaagaaacatcgactaactcgaaagacagtatttctgttgcctcctttcagtgatcggtcagctaagtcttggagaggaaaagggacatgacgagggtggttctaggagtgtgttatttcattctgtcttcacagcaaccccatataaatagcaagaagtggaggagctaaagcacgcagattaaggttaaggaacttgcctggccgggcacagtggctcacgcctgtaatcccagcactttgggaggccgaggcaggtggatcacctgaggtcaggagttcgagaccagcctggccaacatggtgaaaccccgtctgtactaaaaatagaaaaattagccaggcatggtggtgtgcacctgtaattctagctactcaggaggctgaggcaggagaattgcaggagaattgcttgaacccaggaggtggaggttgcagtgagctgagatcgcgccattgcactccagcctgggcaagaagagcgaaactctgtctcaaaaagaaaaagaaaaaggaacctgcctggactcacattcggttactaagagttggagcccgagttggagcctgtgccgttgggccccagggcccttgtacttcatgtcacctccatgccacagctcctgttcccagctgtgatgctggaatgtggattggaaccaagtcataaagaaacttggagtttggatttaccctatagacagagagaggcccttgatgggtccttaagcatcaaagctgggttttacagagatgtttctggtggactggcttgagggagacaggaaatagggaggtcagctgggaaacgcaacatacagataatgcgattgacaaacagggctcgcacggaagcacacgtgcctatggttgtgggaagtgggcagttgggaatgctgagggtctcagaggcctcccaccatgccctcttcactgagcaaaggccatttttatctgctacacgtcaggcaaaacctgcgccaactgccaaagcctccacctcaaatctagcaaataagagagaggacggtatggattacgttatatttaaaacaagcccacacaatgcctgtaatttttcattctgactccgtaattataactcaagaccagtcagatcatagttatccccacaccgacctgctgttgggacacatggaattaaaggctttgctcccttcaaattctattttggaggccgagcactggcaggtaacgggcctttctcaaggcccgtcttgttggagcccctcccggggcagcctccacgaaggccaagtcagcaccagggtttcgggaagaccacggatggtgtgggagcagttgagatgctaccgctttgcccgacctgagccctgggcctcggggctgagccaggggcctggaagcagaggtgagcaccgtccttggaccagaccttgggcaggtctatcccagagcatctgcaccctcgaagattcccaaatgctgctctaccctggacctgaccagggtcccagggtcagatgggccaagccctggttgtccggcacacttgtcacagacaggctgctattgcccaaaggggcctaaattcagagaagaagaagaagaagaaaaacatccaaggagtgtgaaggggccaggcttccatggacagcctggctaaccaggcctaggccaactaagcttttcttccagtgtgagcaccacccctcagccccacaatggcaccctagacagagccagagtgggactggctccctgctcgtggacctgggttaccagcaggagtcaggagggccaactgccctttctccacacggccctcccaggcccagtcccacctccccatagccttgcgggggaggcagaacagcatcctttcatccaggcgcttcaggacctgctctatccaggcccttcatgcaccatctcatttactcctcccgtcactctgccaagggggtgtggttagtgttatcacaatttccagttgagacatgaacagatggagctcagagaggtggcatgaccgaggccactcaggtcataagtgaggaggtcagagctgggactgagttgtcctaacatccctggaccacacagcgcatccacaggcaactggcccgagaccgccaggcctgctcctggctgtgcctcagcaattccttggtggtcccatgttcttgggcaacttgctgagcccttaggcctaaggaagctcaggcccagtgcctgtctcccagcccccctcttctcctggtgcacattgcactgctcccttgcctcagccacaccagaggacgagcccactccctgcacagggccttgttctcacgtccccacgtggatggttccctcttccagccaatggtgcatcttacacatgcttctgttttaaccctcaagacattgtgctgttactattcttatcactgtctccggctagacttctcaagggaggacctgtgtcctgtctctctgttgctagttttatgcatagcatgtagtaggtgctcagtaactgtttgcgcaagaaaaaaacaagaatctagaaaactcccatttgtctttaaaactctgcctagaatagatccgatgaagactttgctgattcacacagaccaagctaaccccatttactaggctgtatccttgaggacagggacagagcttgattcttctctgtgaccccatctctcagcacagaagaagcgtcaaccaagggtcagtaaatgtagaactgaattgctctttgcagttgcacacacacacacgcacacgcacacacatactgcacactgcttcagccccggattaagggcatcatgacctgaaccagccaagtgcccatgttattgggctgaaaccaccccaggctgaaatgccagggatgtttgctaaggaagaaaacactgaaatcctaactttaaaaaaagaaacacagtgaataggtgttctatttatatgaaaatcaggtctgtttttaggtaacagccctcccatctcacctccccaaggtgggtcctgtccttgcaccagttccttctacaccccacccggtaatcacagccctacctgccccacctcctctcccctgtttgctctctggggtttccctcgattgcagggtttgagcttccagacatcacaggggcctgtctcagactggccccttccctccctccctgacgctggagttagtgagaaggaggccagagccagggctctgtgagaggagagggggcaggccgggagtcagtctgtcgcaggatctgtcccttacctgatccaaagcacagaagatggatggctggtgcacagaaggagctaagccctgcttctcccaggcctctgtcaagccagcagggtcccactccttagctcggatcatgcacaggtgccccatggcgcaatgcaaagagcagaggctttggaatcagggttccagtcctggtcctgctcctccatttagacaaacccctgcaagcctcagagtcctcagcagccaaagggggcgtcagctgcagagaagacccaccacgtcacactgtggggcagggatggcacaggaccagccactccagcagaggaactgtttgtggaacccagcagggaaagaaattcgactttgagagcagcagctttggcagcttagaaatcatctggaggcttcccgtgcacacattaaacctcaagctccaggtagcccagccctggttctgtaagcggccagataggcccacccaggctcttggcagcaggggaggagctggtggctctgaaaacagcactggctatggcaccacaggggccaagaggactttgtcccctggctcctgctctttctccagcctcaggactccctcacctcctccgtccattcccttgccttcaggagtcccactatggcctgaggagcatcccgctctctggcaaggttctgctcctgctggaacaccagattagagcaggggtgccaggggcccctcaatatgctggcagctccctccagcctcagtcaggttccaggaagagaccagggcaagcctgaagctgcgggctgggcctcaccatcctgggaaaattctgagcctccctcacagctcagcactcaggcaggcacccagcaaaccacagctgtggtttccagagagccaggcctcccaccgcagggacagtaagctgagaagcgctgtagctataaatgtgaagtggcgaaccgcgggacactgccgcaacccagcagcgggcgggagcctgctcccagcctccctgcagggccagcccaccaagcctcagacctgccctgtccacgaggtctctgggctctgagcagagctgttttctacaccccacccggtattctcccatgtggccgcatggagggggtacccgagacagtgcagggagaggggcaggcaggaccctacatagcattttctccacagtcaatggcgctggtctcctcacaagcacagtcttgttttctgttgacttatgcaagaagagggagggggccacataatcattttggtgcttggtgcttctaaaagtcttactccttccctgggtggcaccaggtcacagctacagccccatctggagggtgccttggggtggacctgggactcgtgtggtcctggtaggcatcctcagaagcactgcagaaaaggacagcgtggggaggagccgcaatggctgacatgagcccccagaagctcagaagggtcactgtgcccatttcacaggcaaggaactacacccagcgaggagaccctggagctcagctgtgcctcccggtctcccagacactcctgcactgtggacgggggtggcccatgtggaagagtcaggaaacagaggaagggaaggagagccttttccccctctgtcctcgcagagcctgccaaggaacagtctctcctccaacatcctcctccactggaccatgtagggaaaacatcgcagggtgaggggccatctggtatggcccttcctgttaggctggggagctggccaggtaaggtaaggtcacctcagcctgtgtgtcgccagcccccacgggagaactcaaagacgagcatcagccctcttcttaaaggaaagagcctagagctgttccaaggagccccttcccagagcctgaccctctggggttggcaacaggagtgaacaaaacagacaaaaatccctgttctcatagggcttacattcttacagaggtcggagagacagaccaaataaaaagtaaattgcatagtatgtcagaagatgaaaagtacaatagagaaaagtccaggaggctgcagagagagagtgtggagcagatgagggagttgtcatctgaactaggctgagaagggaccactgagcaaagattggagcagtgagggagcaggaggagaccccgcatgctccagacagcaggggccagggttctaggtcagagtgagtcagtggctctcaactacaggcaattttgccttccaggggacatttggcaatgtctacagacatttttcattgtcacacctggaaggggagagggttgctattggcctctactaaatattaatagaagctaagattctgctcggtatcccacagtgcacacaacagcctcttacaacaaagaagtattcggtccaaaatgtcaatattgctgaagtcaggaaatcctggagtgagtgaggggaagaggaataggagagatagccagggagataaatgccaacccattttttttttttttttttttggaactgaagaagctgacttagaaattcttatggaaaaatatgtgaaaatagcgaggcaaaaataatgaaaaagaagaataaacaaagtagcctcagcagatcttcacatatattataaaaatccctatgacagctgaatgactaatttcttaaatacataaagacttcttacaaattaataaaaaaagaactcttggggctgggcgcagtggctcatgcctgtaatcccagcacttaaacccagcatgtaaacctagcttaaaccagggaggtggaggttgcagtgagccgagattgcaccactgcactctagcctgggtgacagagcgtgaggcaccgcatctggccagaaactattcttacataggtgcacaaagatgtatgtatagatatgcttattacagcattagcaatccactggaaacaacccaacgcccatcaatagggaatttgattattctgtgatgcatacttacaatagaaaaccttgcagcttttcacacctgtaatcccagcactttgggaggccgaggcaggcggatcacaaggtcaagagatcgagaccatcctggctaacacggtgaaaccccgtctctactaaaaaatacaaaaaaattagctgcgcgtggtggcaggcgcctgtagtcccagctacttgggaggctgaggcaggagaatggcgtgaacccgggaggcggagcttgcagtgagccgagatcgcgccactgcactccagcatgggtgacagagtgagactccatctcaaaaaagaaaaccttgcagcttttaaaaagactggggctcactcttaggtatgcctcaggagaattgaaaacatatgctcacaaaagaaacttgtacagagatgtttataatggctttatttataatagccccaaattggaacagcccacgtgtccaatgggagacgacacaaactgtggtatattcgtacaaaggaacactatttagcaacagtaaaatgaacagatatacaacaacaggaatgaatttcagaagtatttcattaaacaaaataaatcagacccaagaatactcctgtatgattccatttctatgaagttcaacggacacaactcatccatggtgacagaaatcagaacgtggttgccgcaggaagtgttacttgaaagggcagagagaactctgggcaggaggcttgtggaatttggatgtggtttctaagatgtaagcatttgtcaaaatcattggatggaacactgaagatctgtgcagttttctaaatttaatctcacctctatttatttattgagaaatggagtctgtgcagtggcgccatctcggctcactgcaatctccgcctcccgggttcacgctattctcctgccgcagcctccctagtagctgggactacaggcccccgccaccaagcccggctaattttttgtattttagtagagtcagggtttcaccatgttggccaggatggtctcgatctcctgacctcgcgatctgcccgccttggcctcccaaagtgctgggattacaggcgtgagccaccgcgctcagcctaatctcacatccgtttaaaactaacattaactattgaataaaaacaattagccaaacttagtatgtcctgaaatagaatgatctccaaataaattcttaattggtggaggggggtaggtagaatcaagcacagaaaatgtgcatagtatgctcccatatgtaatacagttaatggatatctattacataatgtttctagattatataatatttctaggagaatgtgtaagaaactgttgacagcggttccctttcggtgtggatggtttggggactaaaggtctgaagtgagaggcaaacatctcaataccttttgtgccactggaatttcttttactgtgttcatattaattttttactataaaaagtagtttaaaaatttcttgaccagataacagggtgttctgagattgaactttaatatttctctgcccttgatagcaggaagcagggacaccactgccggccatgggtggcctgtggctctgcagctggaagggggcatttgtacaagcaggtcagggaagctgctggaagatgctcctggggtagggaagagagtacacctgagtcctggctcaggaagccaagtgagataaacggaatcttgattgcagagattcagcctgaaatggcaaacttccggttgagaaatgtaaaagcccatcccgtggtatggaggatttatcttgataaaacttgtgtgtgtgtgtgtgaatagatttttaaaaaggtttctggtaggttgggacacaaacccttttcagaggctgtgtgactaaggggagaaagtacctggaggaagggattgtggactaagaataggacagccagctgtagtttgtttgttttcagacagagtctcactctgtcgcccaggctggggtgcagtggtgtgatctcggctcactgcaacctctgcctcccaggctcaagcaattctctgcctcagcctcctgagtagctgggattacaggcacccacccccgtgcccggctaatatttttgtattattagtagagacggggtttcatcatcttagccaggctgttcttgaactcctgacctcgtgatccacccgtctcagcctcccaaggtgttgcaggcatgagccacctcaccaggccaccagctgtagtttgtaatcagacaatacagcatttggactttgtttccacagacaagaacatgccattacaggtcttacccaagaacatcctgatttgttcatctcaaggattgggctttgtgctagtgagctggtatcctgcttggaacccagatcaaagagttgttttgtttatgtgcaagagatggtggggaggagagaagacttcacctgtcccaggtagatgccagatggggagaccccagtccttctccaagaaagctctcagctgatgatgaacaggggaggagacatatgtcctgccctcaggagcatctcattcagaggtcaaaggctaaggagcccagggacttaattttggaatgcaaagaatctttgtggagccataagtccctgccaaaaaaaattaagagggcaatcctggtcaacattgtgtgttcagctaacctcaagcccagatgtctgatccaagcactaagaagagagaactcaaaggcccagggtggaccctttttataaaatgtcagaggcaagatatagataggggaaaggcctgagatggccttcagcgaacccccatagggaagcaggcagtgggaccttggaacaggctccaagatgagacagcatgggagattgggatgggggctccatctggcccaagcagagggagggtcagctggagtaagaggatccgtgactctggggaaagcccttagagaccctctggtctaacgccttcatgaaggaaactgagacccagagtgcagcatgactgatttggtgtctgatgtcaggactgagctctgtgcatggctcagactctagcctcccaatccacgggaccccctgcagaaggtctacctgttgggaattggaggcattgttgaagctcttgaccagaaaaccatgtactcacttcctacctagcaacatgctcctactgaattctacggaaagagggcctctcaagactcatggagtgatcataccagacacttatcatcacctacccaacagctcctcccaccgttttgtcctgccagagcccagattttgtagtgggtggaaatagcttaatttggggaaacataggctaattccccaaccccgagagatgagtcttaattggtcacagtattccaatgggactccaatccccctttgtgaatgatgggtctaagggtaggcaagtgacccacttgtggcccagaagacataaagggaagtctgcatgggacttctgaggaagcttttactttcctagtaaaagacaaagatgcagttgacaccatcatgccctcaccccatccacctttctgccttgaaggaaagcagctgtgtatgtagcctgggggtcaagcatgggggtaaaagtgtgaaggctttaagatgacagagtggactatggagcgcaagtccttggaggctgaaatgagctgttgggccaatgccagcaaccatctacctacagacttcctgaaaagtaaacattaattgaccttctggtttaagccactgtttgctgggccttctcttatttgccatcaaaagcaaataagagagcatgtatggctaagttaagtgttcagaatcacacatcgagttagtggcagttaccgttccaacccagatcttccaactccatgcccactgctccttacactaaccatgaagggccttggcctcatagagcttgtagggaaaggtaagtggccaaaagcaagtcatgccaagggaagatctctgaatacaggtccctctcttttgcctcccctgagataggctcaggacagtgatcaatgagacagggtggtccttgccctaagaagcaaagggtttggttggggaggccatacactttagtgcaactccagccaacacctagagttgtttaggattggcctctggtcagcctcttcaggtgggagcttggcactctggaagccctccacccagctttttgtcagccctcaaccacatggtgtctggaagagtcctccacccacccaccagttcctcccccattacccctggccattctactcatccttcaatgcccaccttggatgaccttcattgaccttgcctactaccaacagcttgcacctaattgactgcactgaccaatcatttatttatccatcatactaactgtatagcctgctctgggtcagccataatgctgacactagactcggtgggcagtcagagccctcagtctggtggggcaggccagtcaacggcagcggcacagagggcagtgatagagggctggggaggaaggaagtcagcagttgtaccttggtggggggaggtggcagccttttccctacttccctccccaaccaaacactttgcttcttagggcaaggaccaccctgtctcattgatcacttgtcctgtgcctatctcaggggaggcaacagacagggactcatgtttggagatcttcccttggcatggacttgctcttggccactcacctttccctacaagccctataaggccaaagcccttcatggctagcagaaggagcagggggtatggagttggaagctcttggttggaactgtaactgccagtaacttgatgtgtgactttggacacttcccttggcctccctgagcctcgctttttttttgaaagacaaagcaagataataacaccttcctatctcacagggttgctgcaaagatcgaacgagataactagtggattcaacagggacaggaaggcctggcacccagcaggtgggcagggcgtaactaactgttcattcatccacctccctgggctccccacactgcagaaaaccagagacaagtcagcagcacagtggagctttccgcgggagacagagcatttaatgagagcaagagctggacagtgtggtcaggaatcgtcccacccaaggaaccagacacatactcggtccttgatggggtttcctgaggctctcatactttctcctgccctggaaaatgccatccaggagctcatctctttgctactgcctctcttccagagcagcacaagaaggaaataaaatggacttgcgggggaaagaagatgcttgtctctcatgtctgtctcttacaggggggttctgaagattcccacagcctctctggagttgttgccccactttggggtctttgtccgagtaacttcaagtagattggcccacgggcaggggttgtttgctgagagatcaccaagcgctgctcaatctcaacgatcctctgttgtcaccagccatggctgtgaaggccagtcaacaaagggaagattttacccagaggagctcaaacgctggcatgaaagactctgaagtggcatagccagtggaaattaacagctgtgtccactctgggcctcaggtgagggagggcctagatagcccactgtggcccccagagcgccatcactgcccatacttggagtgtgatcctagctatttggggatggcaggggaagcatctcccagaaaagatgacctgcctgggagaaaagggggaccccagagggtgccagccaaggcgtctcggcaaatgttgacccagacaacaggggaccaaggagttgaaggaggctcactggagaggtgggacagggggccagtcgattaaaacagaaccaagtgatgaagggcgtaggttggcctgtggtgcactgtgggtggcaagccaggtgtcgtcctgaagttggcaactcagattcctcatcctttggtggtggccacaggaggagttcccagaggcttcaggaggctctgattcccactcgcactccagcagtgggaggttgctcaagaccaggcattccgtccctggctggggtgtcccttccagagtgacagagatgatctgaggctgctcaaggtgagctggaagggacatgggcactggtaggtggttgtcttagctctcaaccaggggatccgattcccatttaaactatctaggacgaagcgagtgaaaaccagagccctgtgtgggggatgcttgaggcagagcgggtacagcagcctgcatcctgatccctcggctacctggcctccctcacagagataatggcaaggcttgggaaagatgggtccagcagcccactgaggggttcccttcatttctgagcctaccctccagctgcccatgaccatctctgcatctgggcttggaggaagaggtggcccattggctgggttttggtggtgtgtggacatcgttgggtcattttggggtgtgaaccccaaaactctgtacaaggtgtgccagaaggttcggtagtcctgaggagggtaagggctgtgtgtgtggtcttgtggctcttcctaagtctcaatatgtgtcacattagcccagtcagggaaatgatccaagtcaaatatggcccgtccccaggtgttgacagccaaaaacacacagaagactccaattatgttcattatgactcctgttttcacctggaaaagagacagagtcagcaccctgaggcctgctggggactagtgctctcagagaggaggacaaagggtcggctcactgggcctcgatgtccctgtgccatgctctgtccctggctggggtgtcccgacccccaggacagtgcgacttcatgtcccccaggtatcctcagtgctcaaggcatccctgggaagtaggcagagtggatgggttctctatgcccgtgcgcatttggaaaatgacctcagagaagtgacaggaggcaacagcttaggccattcagggaaacggtcacagagcccagtgttccgtgagtccaggttcattgctcaccccagtgccttaactatcctacaaggacgtgccagcttccctgtggacctcctcaggctctttctgatgcctgctctgcaagcttccctcatggtcactaaccatcgcttcactaccctgttgtagatattttactggggattggagtcaagtttgcagtccatggtttctgggacccacctttttttttgaaaatgctcatggagtccctgagatacccagcagaggctctgagataacgaacacccgattggtcccaggtacatttctggcctcttgggctcaaacacttgcctctttcccagcccagagctgcaaagctgcccttctcccagcaaaggtgacagagctaatgaagagttcttcctctgactacatttgtttccaaggcatcatctactcccaggcagtgctctctctctccctctccctgcttctacctcttcaggcacccctacaaatctctgtgactgtcattagcatccccctgctgcctaagcctgccctgcctatcttcatggttcttgctaatttgtcaagttcatccttggccatatgagtccctcagccccaccttcaccccttccaaggactcccctggtgcctgcacaggcttctccaggtgggagagtctataacccacctcagagaaagaacagtgtgtgaggcttgagatcatctcagaaaaagaagaaaagctgcattataaatgtcaacaatggctacaggtctggatgttccgtggcattcccaagtcacatgacatcgttttgaaactctgtcattcataaatggggcatcccttatgacaacagcgttatagtccgacgggagtaaataaaaacagctgtgttaccatgtcagcaaccttgaggtgcccataggtgaacacgatggcatttggaggggtggccacaggcaacatgaaggcaaaggaggcactcagggtacagggcagcatgatgtacagcggattgaggccgatggagcgagactgcggaaaaacagcactgcaacatcaccgtacagaacacagaagctcttggggacgtgattctgaaaaggattctctgaatgtgccgggtacgtttgaacctctgtgcctcagtcttggttcctctcccttttgccacgtctctggcagataattccacctacggaacactgaaggctgaggtcagaggccacctgccctagaaggccttaccccctcaattcattcgacatgtatttcttgggcacctactatgtgccagagaccatgctgagtacttagactgtgctcaaccttacagtgccgcgtgcacatgtctgtctgtcttgccacagactgagagagcctagaggccagggaccacatcttctctcccgcatataaatctgtggatgtgtgtgtttttatacatgcgtggggtcattttgcacatggaatttggtagccaccttttaaattctacactttaaaatttagccacatccaacagcacctatcagagagtaggcactcattaaatatttgctgagtgtatgaatgaatgatgtaattcctaaaatctatcaaatcaatcatgtatcatgcacatgagggcagacacatgcaaacatgtttgttgcaaccatgtaacggcaaaacacaggaagccaactcaatggtcactaatagcaggatggttaaataaaatatgacacatacaaataatggaatagtatgcagctgtaaagaattggatttttttttctttttgtgctaatcaggaaagctctccaagataaccaaggcttcatggttagattttttaaaaattaagatgaatggccgggcgcagtggctcacgcctgtaatcccagcactttgggaggccaaggcaggcggatcacctgaggtcaggagtttgagaccagcctgaccaatgtggtgaaaccccgtctctactaaaaatacaaaaaattagccaggcaaggtggcaggcacctgtaatcccagctactcgggaggctgaggcaggagaatctcttgaacccgggaggtggaggttgcagtgagccaagatcacaccattgcactccagcctgggtgacaagagtgaaactctgtctcaaaaaaagtgtgtgagtgtgtaaaatatccagaaaaatatttgagaaattaacagaggtcatctctagggaggaggctagaggattaaggtctgtatacatctttgcattattagacatttttagccatataccatctgcaattttaaaaaactatactatgagcatgttcccattttattactctttgaaactgtgatttttaatggcctgataatgtcatattatatgaatatatgataatttatttcagcaaaccccctgttactatggatatatttgtataataattctgtcatacatcatcatcacatatgttggtaggcatctctgattattttcctaagatatattcccagacatgaaattgctgagtcaaggggtctgagcaggtttaatgttacggttcctgttggtaaacagccctctgaaaggactgcgcaagtcccacgccccctgggaaccactgaggggtcccacgcaggggcccagctcttcgctggcgcgtctccccgaccatcctcgttttcctggctgtgggtacctcatggtgtctgcacctcacactcctctgcagcccagctcaatgaccatcaccttttcctttctcataggtgggcgtgagacaggagtgtgatgggccttagaggtagctgggggagtttttacttgaggttcctggttctagaaaagcccgttttcaaagagcccgttagggcctgcatttgcctggttggaaccctcggtgctcccagttagggctggagatgacaaagccacggcctgtgctaggagagaggaggcatcaccaccacgtgcccagtatcaaaaggtgctccttctactgggcgtctgtttggacagtctgcttaggagaagaggagacaggccactttgctattttgaacactttcacctccttgctatttttaacactttcatcttcacttggaggagaaaaaaaccacttaggtttgctttttatacatgcagacgcccaggcagccgaatggaaattcaccaccttcaatcctgtgttcaggccctctgtaaatctgtctcccaattccagaataatgacagcctctcccatgctcattttgcagtctacagaggcttttcatagccctcatcttacttggccatcagcacagctctcggaagaaagaactgaagggccatgttcagagatcccacatcttgaactcgggtcttctgactgcgagaccagggatctttccatactaccctgaagctggtacgtctttgcaatggatgacagaaggaaatgcaaaaaaaaaaaaaaaaaaaaaaaaaaaaaaaaaaccatagccactgattttcctataagctctgctttcttctcactcccaactcaaaaacatgctagtccatagaacagaatgccttagcctggcactcagcagcttttcccacaaccgacagctacctctctccactccccaggatcccttatccctgtgctcaccaagccaggcttccaggagtcctcagtcatgtgcaccattgcctttccttgtgctgctccatcttcccagaattctctctcccttcctacctactcccaagtccccactcctccaaggcctcttcctggggtttccagccagtggtgctcccagtctgcagtcctcctgcacacctgtgctacatgctcagagaccacggcactggcctgctcctccttagcccaagtcctgtctccccagcttgaaaaataatccaattagatttataaaataaatttgagcacttggtccatggttggtgctttggtcagcaggaggggtacaaagaggagtggcaaagcagtggaggcctcaggggcagaggcatccagggtccacaaatccacgtcacagtcagacctgggtctccaaagcctggtctgagtctggcctggacattgctgcctcgtcagggacccacaatatggccatgtgttcctgtgaaatggaagggctcctccccactgtcaggttacttaccatggaggcaaagatgggcaggaacaaggtggtggtggccacgttgcttgtgcactcagtgaacacggcaacgagcaaggacaagatcaaggtgatggctgccgggggcactgcgtgcaagggctccatctgcttccccatccacacggacagccccgaggcctgggaagcaccaggagggcagtcatctcagcgctcccagcttgcagttccttcagggccagggcaagcttggcccatcctcccctcccgaccctctctctctacacctcataggtgacctcatccattcccaccattttcatccccgtcctcactctgctgtctcctaaatctgtatttccagccagctggcctactatgtggatttacatacccatatgccttctggaaatgtccatccagatgtcccaagagcacaacagactcaacatgctccaccctgcattcatcctccatagcccagaatctgcttctctctctgggcctcccagtttggtgaatggactcaccatccaccagccatccagcccagcaggctgggagtcatgctgccggtctctgttcccctccttccttatacccagtcagtcaccaagtcacccaaatgtctcacatccatctcctcctcttcagtgctccacagttttggaagctcaggagaatgatttcaaccagaaattgaaggtttagatttagggctttgggctgagaagagattgtccagggagagaatgaagtgtaaaaagaggagaggccaaggacagagcctgggcagacactcctgtttcagggagaacagagaagtcagcaacgaaggctgagcaggaatagtctgagtccgaagtaaagctggagactgtgctgagctgggggccaaaggaggagagaatgtccacagagtccaaagttctgagcctgagtgagatggaaggctgcagagtctcagctagttctcctccaagccctgcccagcccaggcccccactccagacatcagagtgatttcctcatgtgcagatctgaccaactcaccccctggcctcagtccttcagtggctgtctactgcattcacgatcaagtccacacccctctatcttggggccctcagagaagtggcttctggtagccttaccagcctcatcttctacttctcctcagctaaatacctcacatttttcccttgctcgtgtgctacttcctgaaatgccctttcatatatgtgcccctccctagtctgtgaagtctgccacgaacagggaccgtatctcaatctcctctgtaatctctgtgcctggcataacactagggacataataggaatgttggatggatggatggatagatggatggatggatggatggatggatggatggatggatggatagatgggtggatggatggatggatagatagatgggtggatagatagatgggtggatggatggacagatggatggatggatggatggatggatggatggatggatggatggacggatggacggacggatggatggatgaagacatgaatagatgcatggatgatggatggagaggtgactagatggatggatttgttcacctccgcaaaaacttagcacccactaggcaccaggctgtgtcctagatattgaagaaacagcaataactagaccaagtctgtctattacactcctggatacttgggtaggtagatggttggttggaggacagcagcagcaagctagctcatccctccctctggctcatttcttccccaggagggaaagaaggaggtaaagaaagttatatttttgtgtgttttccaacatgttcctcacctcctacgctgctacatacttagctaaagaaaaattttgaagtagctaccatgttaagtagccagtagaaggaccaaaagtagtagcaaacaatattgacaaggattggaaagaaagatttccctcagacaaatcaaagcagagattattgtgatcaagccccagagggtaactgacagtgtcctctgcctctcttggctaaccacggtcactcattcactcattcctgcaatcgctcaaaggttactttctgtcttccaggccctgtgtgtggtgtagagttcctagatgacaagacagagtccatgtcctcaaggaatgtgcggttatacgaaggatgcaggcacagaaacacacaagcccagggatggaagggtggagaaacgccaccctcttgacgaagaagagggctctgggcagcctgtggctggagaagttacctcggatcctttagccagagcaaatccgccccctagtagcagcacgatgccccagggcactttctcctgggttaccttccaatccagcaggggagggggataaaatggagttttcctttctgggaagaaaaagaaacacacacacacacacacacacacacacacacacacacacacacacacacaccagagcagcattagaagacaaaagaaatctaatcaagggggaataaagctaataaggacaatgaggtaccatctcctacttataaattagctaaagtttacaataatatatacattgctggtgaggatatgatcaaactattacacacactgccaatagcatcgtaaattggtatgacctttttgaaaagcaatttggccatacattttaagggccattaagactttgtattctatcaccccagcaatattactcctagaagtttatcctaaagaaaaaataccctcaaaggaaaagctatatgcaagaaaacattaatttatgaaaataaaaaattcaaaacagccaaaatgttctataacaggagaatgattacaacccctcaacgcaatataatgccattattagagaaaatatatttgaagactgtagcaatagtgggaaatgtttatagtgtaatatcaatcaaaagtggtagaagaaacaacaaacaaataggattcaaactgtgtgtgttgattataatgtaatatacaggcatattagcaaagactgggaggaagagagaaaacaaaaaattgtgctgaatggaaatcagtgttatggaaaatttgaaacattttctgttcctgttgtaatataaataaaatttcaaatgttaaattcaaatgttaaaaagcaaaaaagatattttgcactaaataataccaccggtggcttgaaagccactgtttcccaggcttttgtagccaatcctcttggatatgatgggattttctccctctagggcccaaggcatcccatagtgaccctttggttccagggctccagtcctgatgactgggcgatcagaacaggagacttaccttcctcagtctggctgcggaagttaaacttgggcttctgtgaaggcacaatgaatagcagggtggccacaaagatggccacagtggcatcggagacatacctaggtggggaaaagcacagctcatctgcgacagagacagtcactcaacaaacccatcacaactccggcagttctgtgtccaaatgcttctatgcaaagaaacaggctcacagccttaaaagtcaaggtcaagagtggtggccaggtgcagtggctcacacttgtaatcccagcactttgggaggctgaggcgggcggatcacgaggtcaggagttcaagaccagcctggccaacatagtgaaaccccgtctctactaaaaatacaaaaaattagccagacatgctggcgggcgcctgtaatcccagctactcggcaggctgaggcaggagaattgctgggaggtggaggttgcagtgagttgagatcatgccattgcactccagcctgggtgacagtgtgagactctgtctcaaaaaaataaaaaaataagagtggtatgggagactgaatcctggctagaaatcaagatgcccacactcttgaccaccaactttgggtgatcctaagcagtttacttccccctctcagcgtgcattctccataagtgtatttcaggacctcttcttgaccaggttctctagaattctgtctgggttcaccagggtgaccatgaagactttggtgctgacctaagccgaccttcaaaacgaaatggccatcataccagcatctccctgcccacatcttctgccttttctaggatgtacatgtttctcatcctttcttccattctgacaacgtcttagccaggagagaaactacatgtaccccctttgccaagtctctgtctatgaagctccctagatgtgtgcctttggagggatttgaccagatgtgaagatgagaaagggaagatggcagagcagagatttggaaactagagctctgggaaccctactcctagcccaagaaatctctctcatcacagctctggccaccctgcctggccaaggattttctgctcagcctactcagggaggagaggataccacaggaacacattagggtcttattgtggagcttggtcagaaaacaaaaatgagtcatgaaaccaacagagtgctctctgaaacccagctcccaaaagaggaaaagtcttgaccaagcatgagtgcctggcccacattcctcttgccacctgtagccgagaccagcagcatttaggcactagtgcactaagccagtggtgtctttctttctctttttttgagacggagtctctctctgttgcccaggctggagtgcagtggcacgatctgggctcactgcaacctctgcctcctgggttcaagtgattctcctgcctcagtctcccaagtagctgggactacaggcatgtgccaccatgcctcgctaattttctgtatttttagtagagacagggtttcaccatgttggccaggatggtctcgatctcctgacctcaagtgacccacccacctcagcctcccaaagtgctgggattacatgtgtgagccaacgcgcctggccctaagccagcgatttctattgaatccaagacttactttgtctcaccctccacccaggcaacagtcagccagccgggcatgaagccggggtctcgggagaaccacaggatgaccagcaggaagaagcagatcagcacgttgatctccgcgaaggacaagggccccagcttccggtactcctcctgcagcaccttgagggcagccttctcgtttttcttgctctctagcccgcagccccaggactttttaaaactggagaatgcaaagatgagagaagggcagggcagactggttggctcaggtgctggtcagatggagcctaaatgttctacagcagaatgtagcaaaaagacacataatgctgtcctcgcctgctatggggcctggagaaaggcccttcctgcctctttccctctcctgttcttccatcccagaatgtactagggaaaagtctctgtagagaggctagagggtctcggcaggtgcccagacacctggagactggctgctccagggtcacctgggggaaggccataaggagcttcggagcctgcgcaaggtgggaacagggctccctcacatgcttcccaagtcttcctccttccacctcagcctggagctgccttcgatggtgttgggatgccaacccccatcaccaaggtggctcagggagatgcagggagtgagtatgaaccctggcagacagggctagtcaggggcagaatgggtccttgtgttccctggagttggaggtgcaggattagggatccaggagaccctggggttagcagcaagcatggctagggcaagaaggaagacagcccaggatggcacccccatcctggatgggcccccttgggaccagtgtccattgtccagggtgtcctgcagggcctcccctaaggtggcgttggcatgaggaggcagggaggagaggaggttcttggaggaggtgtaaaggggagctcagctgtggaggggggataactggggccactgtgcataggactaaggcctcaaggtatgctgaatattccattcacacattccagttccagccactgttggtttgaaggggtgggcaaggccaagagtattgtcctggagagccctccctcgtgagagcccttccgggggccatgagacataatcataggagggaaggggttgatggaataggagctcattcctgaagccagtgctggatgtgaacagccttggagagtgtgagggccaagtgttggtgtgatggtggcttggcctggaacatggggacaccaggacatcaggtcacagctttctggggtgctcaggggtcagaaaaggaggcaacactgatgggacctcaggtctacacggctggctaggatctccctgctgggcaaggccgtgtgtcctgagggtcacccgctagggacactctctagacatccggcacagggatggctctgctggtgtaagacagggcctctctgctgccacacccttggcttagtaaagtttgtgctctaccaagcacctctctgctgccaactgtcgtcctagagaccctggggctcagccaggggcttcaggtttccagcataaggggtgaccttggtattactagtggcccaggagccagagcctgcatttggtgctggcagctcatccccaacaccacagtagctgcagactctggggctgcatggagtatgcagtcttccaatgccagtgccccacagtggtaccgccaagccttcagagtctctcgtgctgagcagctttgctctcatctctgggttaatttcatctggtgatgaccaggctggcatgagatgcaagtaaatggatccagttggcctgtgaggggcctaggtcagggtcaggggtggggaccacagagtcctcctgcagcagaacagccttcaccatgatgcaccatggtgaacttggactgaatatgttgcagagccaacaagaggggagagattcttgagctttgcatgcctctgccctggcaggggtcccaaagaaccctcatggctattacaggaggtaagcctggttgggacagttaggtataaccagtaataatatcccatgtagttcttggtggtcctggggtggggtctggcccctttggctagatatagcctaggaggctgcactaggctcttcagcaagatagttgttctggattaggctagaggccaagaacttaacctcgttctccaggatcgttcagatgaggaactctagtgagagcaacagctgacagtggagctgcctcctgccgctgagacaggtgctccctggcctcaggtggggaggtccatgaggccacaaaggcaggcagggaccaccaggtcttagtttgtggcaggacgtggcctgggccagagcactgttcccaccactcaaaccgaatgtaaaagctgtcctctaccttccagatctggagccaaaacaaagctgccgtgagctaccccggccagccacactgcatgcgtccaaactagagtggcccgtcgggaaggggaaggggtgggactggactgcagccacgcaccccaccacgagcatgctcagaagccccctgctgcagacactctcaggctcccccgccagtcaacaaaagctgatgaaggccgtgccaggctgggtggactcagcttcaggttctggctgtgagtctccaggggcctgacatctgcctctggccagacaagaagctgatggtgcccttgcggcctcggcgccatgctatctccctcctctttctcagtaggccttggggttctagggcagccccggccccaactagtgtttctgacacctggtcatgcttaggtctggaggcaactaaggacagcaaccctcagcctccccaagaggggatgccatgcagtgggagccaaagggcctgggttcaagtctcagtccccctacttccctgttacaaagctctgtgttgaccacatcacctctccatgcctcagttgccttgtctgtaaattgggaataataataatagtgctgacctcgcaggttgttgtgaaaattaattaagtttaagagtgcttgggccaggcgaggtggctcacatctgtaacgccagcactttgggaggccaaggagggcggatcaccggaggttaggagttcaagaccagcctggccaacatggcaaaaccccatctctactaaaaaatacaaaaattagccaggcatggtggtggtgggtgcctgtaattccagctacttgggaggctgaggcagggggaattgcttgaacccaggtggtggaggttgcagcgagccgagatcataccactgcactccagcctgggtgacagagcaagacactgtctcaaaaataaataaataaataaataaataaataaataaataaataaataaaataaaataaaataaaataaagaaaggaaaagagcgctcgaaatcatgtctggcacatgatgagcactcaataaatgttggtcattattattcctgttgccccatgaggagacacagatgctcacctgcagcaggttcaggaccatctcctgagagacctgttcgacggatgtgaacaaatgaacaggactttggccctggtgcagattcaagaggcagggcaaagagagctactgtcaaagccaggctgggtggccaggcagccatgcaaacagtttcccctgccccgtccatgggcaggacagagtggggtttgggcaatgatcattaatattgtcattcttactatcattattatgattgttttgaatatgtatagcaacttttttttttgttttgagacagagtcttgctctgtcgcccaggctggagtgcagtggcatgatcttggcttactgcaacctctacctcccggcttcaagcaattctcctgcctcagcctcccaagtagctggggttacaggcatgtgccaccatgcccagctaacttttgtatttttagtagagatggggtttcaccatgttggccaggctggtctcgagctcctgacctcaggcgatccgccctccttggcctcccaaagtgctgggatttcaggcgtgggctaccacgcccggctaatttttgtatttttagtagagacggggtttcaccatgttggccaggctggttacaaactcctgacctcaggcgatctgcccacctcggcctccaaaaatgttgggattacaggtgtgagccatcgcgcccggcctgtatagcaactttttaatgggagttttcaaaacagttcctccttcagaagaaaacttaggaaaattccctattttccccacaaaatcacaggtttccgtgggcacttttgcctctgagctctgcagtctcttccctctggtcacaaattcccctggtttgacttggctcgaacttcctgtggatggaggcacagagcacaggcacttaactcagagctgagtactttctatcctggtgtggcctgatcacctttgcaccacagataaatttgtgtgttttagaaaaacaataacttttttttagctatttgtcagccacaggtcatggtttctgtccaaagtctggctgccatcaaaggtgacccctgatgaacttgcctgtgtgctaggaacaggaaggtaaactttctaggacctgtacactgctgggaacaccagaggtattcagtaaatgtctgggtttggatggatttggtcataatcactgctggttttactcgacttaaactccccgtgcattgaggcacagagcgtatgcgctcagctcagagctaagtcacaggtttgcggtgacctggcctgatggacccacacggcaaagaggaagcttgtccagcaatgtcgaactggcacgtggggaccagcttatctttaattgctttaacctgcctgctcttcctccctgtgctgggagctgtgcggggtgcccagcatcagagtggttctggaggaattcaaagtcaccggaagccaaatgcagatactaaaggacaggcctgtgatatgcccaggggccgctcagagatggaatgggggtggggaaaagtcagggaagcagcatttgaactagccttgaaggctgaggaggtgggaaggtagagaatggcattccagggaaaggggaccacgtgtgcacaaagctcagtgagcagcctgggttcgaaggaacaggagggcagactagcaggagacagggctggagaaagatcagggccagacacgaaggactttgtaaacctgcctattgagtctgagggctcttctgcagctttgaggcataattaggcataattaggctgtgagcagctcaaacttacttgaatctcatgtaaacaaactggagccacagccaggcgaacagcagcatcaccagcatgttgggaaaggcaaatgcaaaccaggaagcaaagttcacgaggtccttgctgtcaggaaacaacctacaagaagacaccggcccccacctcagatgctgagctgtgggagccagcctggccctgtgcgtggggacggagcagcagctgggccctgagaggcgcgcctgtgtggaggccacatcctcctgaggtctagccaccaagtccattgccaagcattgtcccctaatcgagtgggagcctcagaacatggccacagcacaagacaaggccgagaaatgacccactgactcttctgtgtgtccaggccttgctaagagtctcatggaagttatggcccatccctccagaaaaatacaactttgtggccgggcgcaggggctcacgcctgtaattccaggactctgggaggccgaggcaggtggggcacaaggtcaggagcttaagactggcctggccaacatggtgaaaccccgtctccactaaaaatacaaaaattaaccaggcatggtggcgggcgcctgtaatcccagctaatagggaggctgaagcgggagaatcgcttgaacccaggaggcagaggttgcagtgagccaacatcgcgccactgcactccagcctgggcgacagagcgagacttgtctcaaaaagaaaaaaaagaaaaatacaccttttatacacatgcatgtaatttggctgacatctttggggatctgcagagacctcagcaatctcgctctgtgggtttctgcaaagaacggtccccccacttagcaaaggaaatctcaaaagcttcccagagcggaggctggaggagggtcacttccaccacaggccccgcctcccatccccggggctctgctagccccaggggcgccccctttagctcaagagtgtcaaagcaggcgcagagctttccccactcagcccagacgggctgctcttcccaaagaaagttactggagaactgtaaggatatcattacagaaaacactcccgaaattaaaacaaacgggttgttgaacctcacgtttctgcccagccaggctccagacctgtcctttccacctcccagctcctgcgcccactgccctccccacccctgtccaggctcctgtctgcaaaggatggcatcaccttatttttgtgcctgcccactgcaattagtacatacctcaattagtacatttatgtaccagacatgcctggaagccccaggcatcttgccaccctcaacagaccatgactaccccgcggcagggcccaggtttctctccctcttggggtcctcatggcctgcatccctttgtggccaaggctagaaagttccaaaccatcccatggttcacctgatacctcacaaggggactataacgaagcagtgaagcagtgaatgacccaaccccagcccttcataccatctgtagacctcggatgccatggggccatcaccattagccaccaaaagcagtgagcaaagggagtgctggggagtcttttagaggtgtctattttctacaagtttcaaccaaggacccagcgtctggaagtacattgtcatctgccatgactttagctcagagttcaatccacactccctctctgagccagagtccctgaccccaggggaggtggtgggtcttgcatcatagcagaaagcagactgggacgttagctcccctgacatcagctccctatcctctctaaggcttctgtgtgggcacaggggtgccaggacacagaggctagatggggccacatctttccacccctgccaggctcccaggccaggtctggctgccccgaggctttccaggactctgcagaggagcagagagaggtgggcaggtccctccagccccggtacccacttcgttgtccccagaaggtgcgaccaaggactcactcgttcatctggcccaggagcaccacgttgggtcccgtcccggtcagggtggcggtgcccccgatgctggccgcgtagcagatgcacagggtcatggccttacacaacctcttccgctcttggtcttcctgctgccccagagtggggccttcaaaaatcacttgactccctgtggtgggcacagcgctgttagctgagccagtcatgggggctgcccacccagccccaggtcctgactctgctgctgacctgaggattgggaaatcccagctctgctgatttagctgccccactgggctccataagagttgctggcagggatgtgcccgattcctctctgtaagccccaggaccttgcccagggtctggcaatcaggccgtcagccacagaccctgactctactgcactgggctggggatggtaagggaacacggcagacggcaaggtagatgctgactcgtcttccctgagcttcgcacctagcagggaagcaagcatgggacgccaagccccagacctatgggagcagagagtggaaggatttgagctgctcgaggaggtcagaaaaggcctccttgaggatgagcaggagtagcaaggagtgaggggcatccctaagtgctcgaaagatgcccaaatgaataatcaggtgaacacactgatttctgcaactgatgggaactgagggtgagactttgttcaaagctctattaaaggatctaagttgtgtgcaataatcccctcctaaaacttaggacaacagtattttctatttttttttctctatgcgtgtttaaaggagggctccgggaagcagacagggagaaggaggtggccaaagcatttgccagcagagggaggggaaggctgctgttgtggcctggcagtgccctggccaggggctcacctggcagctccttggccttgcccttgtccaccagctccaggccggcctcggtggctgcgcttgtggcttccatctgctgcaatatggcctccacgatgggcaccatcatggccgtggttgccgtgttactgatccacatggacaggagggctgtgacgcccatgaagcccagcatcagcctgcagaggaggggcagggaggaaagccagagaatccccaccccacccccgtactccctgggaagcaactggggactgggtccacccctgcagggatgcacaggtgttgaggccaattcaagatcagatattggaatagggatgacggttttagagcctcccctccctccctccttcccttctttgcttcctccattcctctctccctcctgcctctcccacacccatgactgatgtctactctgcttgcttctggggttaccaagaggcctcagatccagtcgtggttctaaggagcacccctgccccaccatctagcaggggaagcccaggcatccagatggtgccaactcaatatgagcttgccctagggtgtgctggaatacccctatgtgcaggcagccccagcttcccacttctggctaggaaattcccacccacccccaaactctgttgcacctctcagaagttcagaagggctaagcagagtaggggtagggtgagctggggagggagcttgggaaagtgtgactattctcccggctgccactccaaccctgccatctcccctccgccccgcacatacactttgacccctccatgctgcagtggagctatcacacaaacagtattcagaagaaacactccctttgcttgtaacccctgctcccttctctgctgtctatcaggaagactcctcatggtccttcagagcctgctcaaacaacatccctcctctgggaccacgctctcagtgtgtgcaccaggtggggctggcctgacccttctcaatccttccccctactctaatcatcgctgtgctgggttcaaagcacctgtttccatgtctgctctctccttgggctgtgagcagggcagggcctgactctgctctgtggctctacatgccccagctgtccaaggctagggacagaaggagctcagctactctcagtctgtgggcctcgctgcagccaggctcctcctcagggctcctaattcacctgggggtaggagcaggggcaggggtaggagcctgaagaagggacctaggagctgttctgcaccagggcccaagctgctgtccacacaggcagacattatggacccaaaaaaaaacaaagcccgggacccaggctaggaggagggggagagtttgcatgaatggagttgtctgagaagaaccaaggcttctacatgatatctcaaggcaccaagggtgcctcacatacaggtgactcccaggacaggcagtgccttggacaaccggagaccatactcagaggagcaaggtggcaggaaggatacagaagcatgtgtgaacttgggtttggaagtggaagctctccagcatgctgcagaatgaaacccactggagtggcctcccacccaagctggccactcaagggagccaagcagaagaattctgagggccctgaggtccactttcctggggtctctcatttctagaaaatatgatggcttttgatttgatgctaaagcaattactggaaggaatcaatgccaggatgtgtaacagatcagagagccacaaagtcccctgctcaggggaatctgaggcaccaagggagccccgggcatgggttgcctgcagggcaggctagcgtctgtgtgtgctcagggtctagcacagcccctgacacaggggcgcctcaggaggaatttaccgtaaactgaccagcagctgactcctgatggctgggccaaggacgtgccatcattgaggggacacattgtctcaaaaggaagatatgccctgagtttctgattagagaggacacaggccttatcagagaagctgggtccaatccccgtgtgtccatgagcaaatcactttatccctctctgcctccaatccctcatccacagaatgtgggcagtaagaatactcagctctcagagttgtggtaagaattaaatgaggcaattcataagctcctggtatcatgcctggggccttgtagacactcaatatacccattatgatcatgattgattatggttatgattatgattatattgactccatggcttagctggaaatggctagctagattggcaggagagatcctggaaatggagagagaagctggggtactgagtgatatcggggaagataagaagcttctttgcagtgggaatagatgctccagcttggagagaggacctttctgcttccccatgagctgggtagttgagccacttctggcctgcttcccttatcctatcagacacagcttgatccagcctctatccaatttgttcccggtggaaccctgcagctagctgcctcccccagaaagccttccaagcctgcaaggactcttgctgacccacctcctctggattcgaggacccttacttactgctgctcaccatgtgccaccaccacgcatgcatctggtctctcccactaaagctataacgcaccccacccagccaagtccaggtaagcccatggccagccctcaccagtggatggcctggtctgtgccatcctccacccccttccagccctggggctcatgcagagccacgtggcaagagagagaaggcgtaattaccgtgcaggcttggcccccacccagaggagcgtgcgcagggcgatcctcttgtgcaggttccagcgctccacagccacggccacgatgaggccgcccaggaacagcatgttggtgtccttcatgtactggacacacacctggagcgtggcacgaaggcctcatcaggactgtcccttgccacacactagagccacccagtccccagatgctgacttcagggacagcttggagtggggatgcaggctcgagtggtgtctccctgccagggagaatccacaaatgagggttttccggtcacccccaggcctgtgcgactcacagtggggactagagaaagagagaaggggagaaccagaaagtcaccaggatcccttgggtctgctcacctgcctggagtccagaatctggaagagtgggaaaagcaagacaggcatgagagaggtgacagccagagggatgacttctgtgcaccagtaaatggccatgaggatgatgacgtaggcacacctgacaaactgaagagacagtcctgaggcctcagcgtgttgccgcctccctctccccacccccagaacactccggacggcggctggcatggattgtcaagacacagtgctgatctcagagggattcccctcaaagtcatcttgttccccagccctggtcagcacagctttcccgggtcaggccagggatctattcgcaaaggactcctgccccattcccacccctcctccctgcctccctccttcccagctgtgtggttctaggcacgttctttcatcttctcaaaccttggattagctgcctctcaaaagaaaagatcaagaataggacaaggaagaaaaggagaaagaaggagaaggaggagaaggaggaggaggggatagaagaaagagaggaagggggatggagaaggaagaaaagaaaggaggaagaggagaaggagaagaagaataaaatacctggtttttttggttttattattattttatttttgagatggagtgtcgctcttgccgcctaggaggccattgttctaagagaagtgactcagcaatggaaagccaaatagtgcatgttctcccttataagtgggagctaagctatgggtatccagaggtatatagcgtggtcgaatggatactggagacttagaagcagacagggtgggataggagggagggattaaaatctcagacttcaccactatccaattcattcatgtaaccgaaaactacgtgtacccctaaagctattgaaataaaagtaataataattatgtgataaaactagccacctccctaggttgttttatgtttcatcagtattttttgtgtgtgtgtgtgtgacagagtttcgatcctgttgcccaggctggagtgcaatggcacaatctcagctcactgcaacctccacctcccgggttcaagcgattctcctgcctcaacctccggagttgggattgcaggcacctgccaccacgccctgctaatttttgtatttttagtagagacggggttttgccacattggccaggctgatctcgaactcctgacctcatgatccgcccacctcagcaccctaaagtgctgggattacaggcgtgagccaccgcgcccaacctcagagttccttcttagatgtctccctgcgcctcttctatagtctggtttgtgcccttcctctgagtaccctccccagccattagcatatggagttgtcactgtttcctcaactgtccttctaccaccacaaccagtgcgtgactcgaaagcacaaacagtacagtgagtcctcacttaacatcattgattggtttttggaaattgcaatgcgtaagcgaaacaacataagccaatattcccataggcaaattgctagaaacaacagttaaatttctacagcatatttctggtcacaaaaacatcacggagatcttaaataaagaccaaaacacttccaatattaaacactgaagggaatgtgagctatacatatacttaagaaacattgaaaacaagttagataattatttacccagttacagcaggtcagggtcttgggtgaccagatcctgtcccggcagctcagggtacaaggtggaaaccagccctggacaagatgccatcccattgcagaatgcacactgacacgcacgcccacgctcactcagacagggaccatacagacactccaattcacctaacgtgcacgggtttgggatgtggaaggaaaccatactagccaaagaaaagccatgtggacatgagggtaatgtgcacgctccacacagacagtggccccagccagtaatcattttcttttctttctctctcgctcttttatttctttttttttttttttgagacagggtctggctctgttgcccaggtgggagtgaagtggcacggtcacagctcactgtaacctccatctcctgggctcaagggatccttccttttttttccctccctcatcaacattataatgaaatgatattgaatgaatcaacattattcaagaacctgctgtatttgtagatcaccgtcctcagcatccagaacaggcccaacacttaggatatctttgcaaattcttgcttatttatttatttatttatttatttacttacttacttatttttgagacagagccttgctctgtccccaggctggagtgcagtggtgcaatcttggctcactgcagcctctacctcccaggttcaagcgattctcctgcctcagtctcctgagtagctgggactacagacaagcgccaccacgcccggctaatttttgtatttttagtagagaggggatttcaccatgttggccaggatggtcttgatctcctggcctcgtgatccacctgtctcggcctcccaaagtgctgggattacaggcatgagccactgtgcccggccatctttgcaaatgtttattaaaggaatcaatagcattcatctgagtttaactctgacaatgctgctgaagaacagatgcacctgtacacaatccctgcttctcatcacccagaagagcgtatgtattatttgcacaaaacagtgcaggaagacttggaaattctttgtcagggttgtgttatcagccacaaaaaaataaatcttttttcagcatcccacgagcaaaccagggcacctccctactgggaggcagggtccctcagcctcggcacactgacattttgggctaaatgatgctttgttgtgggagctgtgcactgcagggtgtttagagcaccgctggcctccacctatgagatgccagtaagactgtctccaggttggacagcaaaaaatgtctctgtactttgccaaagttcccctgttgtggggcagggtgagggcaggagaaagggtcaatgctggttgacagccgctgaactaaaggcggaacagcagcgtgactggaagcccaggctttgacaccagacagatatgattggcgcccactgtcagccactgtctggcctttggcagccactaacttccttggggcttggtgtcggggtgtaccctgggcaggccatcagaatgatgcctccaggggcagacaatgagagggcgcattggagagaattttaaaacaataatattagctaaaaattagtttgcttcttactatcatcaagtgatagcaattctaaacaatgtcgctcataaattactcctcctgctcccaatcctggtccctgtcccctcttgtttcatgtcttcatctgcaaatcgtggatttaagagtgctcattcttcccatatggcgcacaaagtcctcggtaacttttgattctctaaacttagaagcagtaggtggcgtgcgtcaccaatgtacactgtgcgttcctggaggagtcaagcagacccactaggaaagaggacgagacacaaggttaactgccccctcacctccgcgccactatttagaagcccaggaggtgcctcatccctgaagtcaacaggcttgacccccctagtctagaatgcctccacagtgtcaagggagagggcaggatgggaagcggatgttagaaaagttcaacattaacaaggcagggtgtcctgacacaccacttaatgaaaaaatgcaggcaaaacctactgtgtgtgtgtgtgtgtgtgtgtgtctgggaagagagagagagattcatctggaaagatgttcatcaaaatgtgaataacttatgggatttgagtgtacttttatttttactttatatcttacagatttgcaaaaaagaaaccttttacattttaataaaataagtgatacaagaaatctatcatttatttcattaaattttttttcaattaaaaaaagacccagaggaaggatagagagagtggagcagagatgaggccaggagggaatccaggtggagacaggaaaactggagacagtcggtgaggagagaggcctgggtgttggcagagggtggcgtgccctgggagtcacctcctggcaaggactgtgttgctcaggctgccaaggtcctcccagcttctcaccagcttcccagctgccctgcccgtgctgtgtaccctctgggtttccttgcacaatggggcggccatggagggtgggggcagggtgaccaaaacaggcagaaagggaaaaaacaagaagacaaggtccagggtcctcacccaaccccgccagaaggaaagctcgtgaaggcagcctttggaaggactctccctgggttctcttcttcccctccctggtcctcactcaaaggacagcttaatctctctctctctctctcttacacacacacacatacacacacatacacacacactgagttagggtttccagttcagggtgtgtgtgtgtgtgtgtgtgtatgtgtatgtgtgtgtttgtgttttttgtgtgttttgtgtgtgtgtttgtgtgtgtgtttgtgtgtctgtgtttgtgtgtttgggtgtgtgtttgtgcgtgtgtttttgtgtgtgtttgtgtttgtgcgtgtgttttgtgtgtgtctgtgtgtttgtgtgtgtgtctgtgtgtgtttgtgagtgtgtgtgtgtgagagagagagtgtgtatgtgtgtgtgtgtgagtggggtctcctgtggcaggaaggtcagccaagctactataatcattccagggaacatcactccctaccagcagagctgaaatcgcagctctcctgcctggctacttcccctggacaataacaaccccagacttcttgctacagaggaagtgtggctgcccacagttggtgtggcaactgcacagcctccacagttggatctgctgtccttgacccatccagggcctgtgctaggcccacccaagggctcctcccagtctccccctcccccatcctaggaactaacgttaatcccttttgattcccaaagccttaaagtgtcagaaccaaaccacctagccccattgtacagatgagaacaccaaggcccagagagcacaggcacttggctaaagtcacacagatgacagaatggtggaagtccagttctcttgcaggttggcttcctgacaccccagtgcactcccttcctctagagctcccccccagagcatcccctgaagagctcctctgtttcccaaacctgcctggggaggggaggtggggagctggaggtttcctgtctgggctgagagtgaaagggctgaaagaaggaacgaggaaggagcagccagcagccacaaaaggcttcaaagggcttgggcctccgccaaactggctgtgcacagcccagtggagcctgcgcccaccctgcggccaaggccattcattctctctctccctcacagaagcattaggagactagggcctgggaggaagcttccctgcaactccaggtcctgccacccaaggcgcgagctctgggaatgtgtcccgcctcctgctacagccccagcaggcaggaggcaaagcaggccaaccccaacctgcctgcagcctggagcaggattatgaatcagatgtggctctccaggttggaaggaatgtggatcatagatagagacactaaggcccaaggaagggccagagagtggcaaagacagcgcaggatccacgtgggtgatgatttttttcctgtaggtccctcctgacggcagaagccacctacagcttgaagtcttctttggcgaagggaaaagacaggagagagagagggaaaggcaagctcccaggttccctgttggcgcaggtggcattttggggggaaacagggttatgcactgtgggagattcgattcggagccaggggctgagcctaaggctgggatctgtgtggctgagatctgtgctcacttcgaggtttccgtgcttgcctggacggctcttgcgccctgggatctgtaaaccccaagggtggtgcgccctggggtcgccatgcccctcagattctttacagggcacctcccatccggcacctggagctcctgagtgcgcgcgccccgggagagctgtgctccccgcgaaatccgtgcgctccagctcagggctcccgggatcggtgcccgttagtgggcacaggacgccgggtgtccgaagggctgcctggagatgcaactgaccttggcgggcatcagaatgacgagtggcagcagcaggagcggggtgacgaacaagatcacgaaggacttgaacttggagacatagctcagcgccgaggccatcgcgcgggagggagactggcgggcgagacgagtgaggggcagctagaggcgccgcgggcttaagaaggggccacagtccccggggattggggagggggcggtgacaactccgccccgcacgggggcgcctccccgcggccctggggcggggccacccctcggggtctgtgggacgcgcctgcccccaattctgccacccggcggcggtgggaggcgtctttggactccaacgcttcgggccagccctctaggggcagcctgggccctagcatctcgcgctgtccaagcctctcctgcgctgccgaggcagaggtgcgtcccggggctgccaagcggggcgtgttttggtcactggtgctgcccgctttggcgtaaggcgccctcccgcgtccgcatctgctctttcctgggctctgaagggtcccggatgaaactctctgcaggcctctgggtctctcaggtctatctccccgatctccctctcctttccatctccttacttccgcccctccggtgtctctccgagaggtgtccccccacgccccgcgccctccgcaccgcgggcctcgcttcccggtcccccctggcttcctcgccacgtccgccccactctaggtgcaggaccccttttccccgctcgcactctccggcccggagctcctgggcgatcgcacagggaagcgaggccactgtcctcctctgtcccaggggctgtcgcgctccagtggacgctgcaccccgcagacgcccggcgggcagatgcggacacgcgtcttggaggggccccaccgagcctcagcagccgcagctgcccgcccgacccaggtcagagggaaacggagctctagagaggaagggacacaactaaggcgacactgagacagtcgcccatgtattcattcagcccgccaggcaacagacaggtgccgagcacctcttctccgcgaggccctgttttgggcactggagacacacggatgcaaagacatccccacctctgtgattttcttctttcctctcctctgcctgcctctcattctgcagcttccttttggggagtctcatccatgctggtggcctaaccacagccggctccttagtgattaccatcctctgccttcaacccagccatgatgccagagtcccagatgtccagccttccgcagactggacgtgtctcggcccgaaaattcaacacatcctgaatcaagctcatgagttccttcctgtgacctgcacccaaggacatgcattctcccaagcccctcctgcaattgcctccctcctgtccttttccctttgtaactctcatgcatatagccctgggttttcccgcctttcctgtgtccccagggcacttagcacaatttgtacctcttatatttattggtgtaatttttactttttacttttttattttttaagtgttatttcatttttaattgacaaatcattgtctatatttacggggtaccatgtgatttttcaatgtgtgtataattgtggtgtgttcaaatcaggctaatgagcatatttatcactcgaatatttatcatttctcttgtttttgttttttgtttgtttgtttgagacagagttgtgctcctgtcacccaggctggagtgcagtggcacgatctcggctcactgcaacctctgccacctaggttcaagcaaatctcctgcttcagcctcccaagtagctgggattacaggtgtgcaccaccacgcccggctaattttttgcatttttagtagaaatggggtttcaccatgttagccaggctggtctcgaactcctgacctcaggtgatccgcccacctcggtctcccaaagtgctgggattacaggcgtgagccaccgcgtctggcccaaatatttgtcatttctttgtggtgagaacatttaaaatatcttgtagctattttaaaatatatgacacattattatgatgtaatttctatttactgtctgttttattcatcaccacctgtccagctagtgcctttctcagtgcctaatccaggatgtgcactcaaacctttttctccgggatgcatgaatgagagcaagtaaacaacttcagttcttttttcttttctttttttttaattttactttaagttctgggatacatgtgcagaatgtgcaggtttgttacataggtatacatgtgccatggtggtttgctgcagctatcaaccggacatttaggttttaagacccacatgcattaggtatttgtcctaatgctctccctccccttgccctccaaccccctgacaggcccccgtgtgtgatgttcccctccctgtgtcaatgcgttctcactgttcaactcccacttatgactgagaacatgtggtgtttggttttctgttcctgtgttagtttgctgagaatgatggcttccagcttcatccatgtccctgcaaaggacatgacctcattatttttaatggctgcatagtattccatggtatgtatgtgccacattttctttatccagtctatcattgatggacatttgggttggttttaagtctttgctattgtaaatagtgtgcatgtgtctttatagcagcatgatttataatcctttgggtatatacccagtaataaaattgctgggtcaaatgatatttctggttctagatccttgaggaatcgccacagtgtcttccacaatggttgaactaatttacactcccaccaacaatgtaaaagtacaacttctgttcttaatacaactgcttccaaagggattcaccagagcatggactctgaggctagagttcctgggcttatatcttgccctagctcatcctggctgtgtgcctcagacaagttgctctctatgagcttatcctgtcataaatggagataatagcaccaactttgattttaaatggctgttttggagattatatgagttcatggtcagagcttaactcagtgcgttggcatatagtcagctgttagtaaatatccattcttgcaattgtatgcaaaataccctggttggtgaggccttaagagaaggatccaccaactctgcctaagtaatgaaggaaggtttcacagaggaggtggcagagcttgcagtgagccatgatcgcaccactgcactccagcctgggtgacagagccagactccgtccccctgcaaaaaaaaaaaaaaaaaaaaaaacttaatggctaagtaataatttgccaggcagcagtggaggatagtcaaagttagcaccaaatgaaaaagaatattaagattgttaagaaaaattccaaggccaaagtgctacaacaacaacaagctaaataaatggagagattataccaagttcacggatagggagaccacacattgtaggactatccatttctctcaaattaacctataaattcaattcaattccaattaaaatcccaacaggatttttagttaacaagcctaaaattcaggtagaatagcaggtaagccaagaataattacgacacttctggaaaaacacgggggaaattgccatttagacttcaagaatgactaacttgtaatagttgatgtaatcattaactattgacatgaggttagaaaaagagtagaatagagcctagaaatagacccatggttgcatggaaactttatttacaacagagattgagtgatctatccaaagtgtactctcagttgctggatcaattagtttttagcaatatagacatttttctttcactaagtatgctaaatacatgtaggagaagtttgagcataatttctaataataaggttatttctgatttttttttttttttttgagatggagtctcactctgtcacccaggctggagtgcagtggcacaatctcggctcactgcaacctccgcctcccggattcaagcaattcttctgcctcagcctcccgagtagctgggactacaggtgcgtgccaccacgcctggctaattttttttttttttttttttgtatttttagtagagatggtgtttcaccatattggccaggctaatctcgaattcctgacctcatgatctgcccacctcggcctcccaaagtgctgggattacaggcatgagccaccgcgcccaacctatttccgattttttaatttatgagtcttatttaattattcccaagagctgaacatgagttcaatttatgcacacagatttttttacgaaagaaaagccctgcctgttgtcatacttctacttcacagataacttaaaattttagccacatatttcattgcactataaaaaatgaagtaatgaaaaagaaagtgcatccgaatttagatcttgtattggtaacttaccataaaatgcataaagtatattagatcacgataattttgtcttgatgtggctacttttagtaacctattaagggaggagaccacccctcatattgtcttatgcccaatttctgcctccaaagaaagaagtaaaaactaaaaggcagaaatgaaatccacaggcagacataccagcgccatgccctgggcctggtagttaaagatccacccctgacctaaccggttatgttgtctatagattccagggattgtaaaaatccctgtcctgttctgttttgttctgattaccggtgcatgcagcccccagtcacataccccctgcttgctcaatcgatcacgaccctctcacgcgcacccccttagagctgtgagcccttaagagggacaggaattgctcactcggggagctcggctcttgagacaggagtcttgccaatgctcctggccgaataaaccccttccttctttaactcggtgtctgaggtgttttgtctgcggcttgtccggctacactattgtcagattgtcttctgaatttctcaggtcttacaacagtatttctaaaaatataaatccaaacattagaatatacttctcgaacacaaaaataaattattccctaacttacagtatgttactgatctacataaaactatttgggaatatttagttataatggtacatagtatgtaactgtgtgatgcaacttttttccccacttgagaatcatttaatacaattttaatcttaaaactgagagagtaaaaacctactttttggtatagaaattctaaaatgtggcgtgttacatccatttgacctcaggttccctttgcagttattggagaaatggtagatggcaaccctctgtactattttgtaacacctgatgagtgaaactatttcaaaataaaaagcagttttaatttgtggcaaataaaaaatatacctcagactgatgaattcaattctttccagcttttttattttttatttttattttattattatttatttatttatttatttttgagacagagtttcgctcttttgcccaggctggagtgtagtggtgcgatcttggctcactgcaatctccgccttccagtttcaagcgattctcctgcctcagcctcccgagtagctgggattacaggaacctgccaccactcccagctaatttttgtatttttaatagagatgggctttcaccatgttggccaggctggtctcgaactcctaatctcgtgatccgccagccttggcctcctaaagtgctgggattgcatgcatgagccaccacacctggccccagctcacattttatggctgatattggtagctaagaaaattgtgatactaggctaggcactgtggctcgtgcctgtaatcccagcactttgggaggccaaggcaggcggatcgcttgagttcaggagttcgagaccagcctgggcatcatgatgagacccccatctctactaaaaatacaaaaacttaaccaggtgtggtgggagggtcgcttcagcccagtgggtggaggtcgcagtgagctgtgatggctcattgtgatgagatcgcgacatgcagacaagccaagaagtgcagcaggtgactaggattttcttagattttggatgctttcatttgaatcttacttatttaaactcacttaagtaagtaagtttatttacacttacttgggcatggtatgtgagtatttctatggacagagctgctccattggtcaatagagtaggcttatcaggtttttttccccacattttaacttgggaacactgttttatttgtaaacaagctttgattgctaaaaaaggcaggtcctggatgttgtcaatagaagagagtattggtcagcgttccctggggtagacttacagctactatatttatgggggtgctgcaagtcagctgggagcctgtggtttggcaactctgctccaggctgtagggaaatggtgggggggggctccatagtcttctcgttctgtactgtggaggggcttcacccagattgaggaagcagaggctcttggggacatgttctcatgacaggagccaagaatgctggtgggaatttgcagtacctctaaaatcttctgctcagggacagcatgttcacctctttcaccttctactagccaatgcaagtctcatgtccaagtccaaaatcaatggagtgggggaaatatactctgtctacagggaggggtggcaaacgtggggagaattaataattgtgaacaaataatataatctaccacccacagtaaatattattaagtccagggcaagacacttgtatctctctctttaaagtgtgtgaaaatggtaccaacttatgtgagtttgaagagctcagttctatgagttatatacattcgaagatggttgtcacagggatgataacatacatattcaaattggaaaatgaaatcagactcttttttggggcaggaattaagtctgattcagatatttaatttgacagtaaagactaactttgccaattagggtttacagaggatgcttcccataaccagctgagctaaatttgtagctccaaggttttgatgaaagtacatttaaaacacatactaccagaaaatcatttttctattatgttggcgaaggtgtgttgaagttaacatttttattacccaagatctttctgactatactgggtcttaaaagatgcttctcaagaggatccgttgaacccaggagttcaagggtacagtgagctatgatcacgccactgctcttcagcctgggagacagagcaagaccctgtctctaaaaaaaagaaacaaaaggaatgtagtgataaataaacaccaaatttagtttagctttaatctgtgggcaggggagggcatgcgattaaagagtgacacttcagctgtatctgaagtgttttattatttgtaactggctatgatacagagatgtttatcatattatcctttattattttaaaaatattttaaagatggcacaataaatatttctaacattttaaaaggtgcccacatgcatttaatactagaaatgtattcatgaggtgcaaggtataagataaagaaaaaaaagtatttccgacaaaataaggagagctgatgtcccgcatactgaaaatgtagtcccctcctacacgatcctttttttctggaagcagaggttgttacgttagagagagagagcagcccaggaagaaaaggctgtactgtgtgtttttcacttaggcaaatttctttttatcactgtgtatataaatgacatctgaattaaaatgcaaactttgatctctttccaaattgatgctgggtccaaagttgtgtgtcactgtagtactagtagccttgaatccacagtttcctttgggctgagtgaggtttcacattttccccttcactctattcagttccttttttttgctgaatggcatgcaaatcttaagtcctttttcccccctccagaggcattcagcaatagaaaagatgaaaatatttgtgttggggggatatctttccatcagtaaaatgtgcacttttttttttttttgagaccgagtctccctctgttggcaggctggagtgcagtggcgcaatctctgctcactgcaacctccacctcccaggttcaagcgattctcctgcctcagcctcccgagtagctggaactacaggctcctgccaccatgcccagctaatttttgtagttttactagagacgggctttcaccatattggccaggatggtctcgatctcttgacctcatgatccgcccacctggacctcccaaagtgctgggattataggtgtgaaccactgcccctgacaaatgtgtacatttttatggcacattgcatatcattgttaaagatgccatataaagtttaccctctgaattaaattagacgaagatttcttttttaaagaaaattgtcagaatcccaaataagacatctgtgttgggaatggaaggagaggattagtgtgagatatttcagaaaaagactctgtgggacaaatttttcctctctacttggaagattctcaacagtgtatacacatttggtaacatctatctcaacaaaaccctctcttcctcacacactcgtccctcacccatttttcttgtggccttggtggcaaagctcctgggaagagttgtttatactcactgtcttcactttttcttcgcccattctccattgaacccattccaatcaggattgtgcaactccattcagaccaagtgtcaaggtcaccagtcacctccaaatcactgatctaatggccacctttcagtttttctctctctcccccttggcagcgtctgttaatactgagccctgtctcttacaacaccttctccacttgcctctagacaccacactccctggttttcctcccaccatcgcagcggcttcttctcagtcttttttgcgagttgagttcttctgaaactccaaacattggagtgtcccagggctcagttcctccctgatttcatcaagtcttatggctttaaactccatcacatgtagacagctcccaaatgtacatctccaggccatccccagcctctctcctaactccacatttgcatctccgacagcctacttgacaactctacttgaatttgtaatgggcatctcgcacttaacatgtccaaaatcactccagaataccattccccagcccaaactgcaatctttcccatcttagtaaatagaaagtccttttttgtttttccaattgctcaggccaaaagcacttggactgggccaggagcagtggttcacacctgtaatcccagcactttgggaagccgaagtgggtgaataacttgaggtcaagaccagcctggccaacatggcaaaaccctgtctctactaaaaaatacaaaaattagccaggcgtggtggcacgtgcctgtaatctcaactacttgggaggctgaggcaggagaatcgcttgaacccgggaggcaggggttgcagtgagccaagatcatgccactgcactccagcctgggtgacagagtaagactccgtcttcccccaaagcacttggattattcttgactttctttcacatccaggcttccaacccagtcctctgggctctaacttctaaatatatctatcatgcaattattctcatcacctccatgggaactaacctgatctagcctccatgcctggatttctaactgatctccctgccttcacacttacctcttttcagtctattctcagaacagcccccagagacaaccttttaaatgatcattccaatcatgtcacttctctgctcaaaaccctccaccgactttccacctcactcaccgtaaacccgaggccttcaaaatggtcatgtgtgtattagtccattttcgcattgctataaagagatacccgagactgggtaatttatcaagaaacgaggtttaattggctcacagttctgcaggctgtacaggaagcatgatgctggaatctgcttggcttctgaggaggcctcagaaaaatttcatacatggtgaaaggcaaagcgggagcaagcatcttcacatggctggaacaagaggaagagagagcgcagggggaggcactacacacggtttttgtttctttgtttttggttttttagatggagtctcactctgtcacccaggctgaagtgcaatggcacgatttcggctcactgcaacctccgcctcccgggttcaagcgattctcctgcctcagcctcctgagtagctgggattacaggtgcctgccaccatgcccagcaaatttttttgtatttttagtagagacggggttttgctatgttggccaggctggactcaaactcctgacctcgtggttcgcccacctcggcctcccaaactgctgagattacaggtgtgagccgccatgcctgaccgatgctacacacttcttttttttttttttttttttttttgagacagagtctcactctgtcgcccaggctagagtgcagtggcgcaatctcggctcacttccagctccgcctcccgggttcacgccattcttctgcctcagcctcctgagcagctgggactacaggcgcctcccaccatgcccagctaattttttgtatttttattagaaacggggtttcgccgtgttagccaggatggtctcgatcttctgaccttgtgatccgcctgcctcggcctcccaaagtgctgggattacaggcgtgagccactgtgcctcggctacacacttttaaacaaccagagctcgtgaaaactctatcatgaggcagcaccaaggagatggtgctgagccattcatgaaagatccaccccacgacctagtcacctcccatcgggccccacctccaacactgtggttacaattcaacatgagttctggggtggggacacaaatccaaaccatattaatgtgatctggcttcctgctacctctgtcctctcctcctacctctccctgcctcactcactctacctgaactgctcctccttgctcatcctggagcacgccatgcctgctcccacctcaggacctttgcaaatgctgtcccttcatcctgcaatgctgtcctcacagatatccacaccgctggctcccttacttctttcagatctctaaatagtctcatcttataagaaaaccttttctgggctgggcacggtggctcacacctgtaatctcagcactttggaaggccaaggctggtggatcacttgaagtcaggagtttgagaccagcctgcccaacatggtgaaaccccatctctactaaaaatacaaaaaattagccggggatggtggtatgcacctgtaatcccagctacttgggaggctgaggcaggagaatcgcttgaacctgggaggcggaggttgcagtgagctgagatcactccactgcactccagcctagtgacagagcaagactccatctcaaaaaaaaaaaaaaaaccctttccttacactttatacaaaaattaattcaagatggattaaagacttcaatgttagacctaaaaccataaaaaaccccagaagaaaacctaggcaataccattcaggacttaggcatgggcaaggacttcatgactaaaacaccaaaagcaatggcaacaaaagccaaaatagacaaatgggatctaattaaactaaagagcttctgcacagcaaaagaaactaccatcagagtgaataggcaacttacagaatgggagaaaacctttgcaatctacccatctgacaaagggctaatatccagaatctataagaactcaaacaaatttacaagaaaaaaacaaccccatcaaaaagtgggcgaaggatatgaacagacacttctcaaaagaagacatttatgcagccaacagacaatgaaaaaatgctcgtcatcactggtcatcagagaaatgcaaatcaaaaccacaatgagataccaatgagacaccagatagaatggtgatcattaaaaagtcaggaaacaacagatgctggagaggatgtggagaaataggaatgcttttacactgttggtgggactgtaaactagttcaaccattgtggaaggcagtgtggcgattcctcaaggatctagaactagaaatactatttgacccagccatcccattactgggtatatactcaaaggattataaatcatgctactataaagacacatgcacacatatgtttattgtggcactattcacaatagcaaagacttggaaccaacccaagtgtccatcaatggtagactggattaagaaaatgtggcacatatacaccatggaatactatgaagccataaaaaaaggatgagctcatgtcctttgcagggacatggatgaagctggaaaccatcattctgagcaaaatatcacaaggacagaaaaccaaacaccgcatgttctcactcataggtgggaattggacaatgagaacacttggacacagggcggggaacctcacaccccagggcctgtcgtggggtggggggcaggcggagggatagcattaggagaagtaactaatgtaaatgacgagttaatgggtgcagcaaaccaacatggcacgtgtatacatatgtaacaaacccgcacattgtgcacatgtaccctagaacttaaagtataataattaaaaaaacagaggaaaccttttctgctcatcccacacaagtagcaatctcaagcataattcacaactgccttccatgctttgtttattttcaccacctgatagagccaaactattttgtttgaatcttctctcccctaatagaagataagctctattagagcagagaccgtctgttctgttcaatgccatagcacccatcacctggaattttctcttccatggtaggtgctcaacaaacacttgttgaagaaatgaaggtgggaagaagagggacaagctggtgtgacttccaggtttctggcttgggtggtgggaggctggtgatgtcatttactaagatagggatatatcagaggaatggaggtgagtggaggtggggagggcaagctggtgaagttttatttttgcctggttggattggagtcacctgctgtctggaaggcagataagtaatttagatttcacgagagtggtcctgctggaaatggagagttggaagtcatctgacaatgatttccccagagagaagattttaccctgaaaaaaaggaaagggctctgccagaaccctgggagacacctacctttagcaaatggaaggaggaaaagatgctgatggagaggacaaaaaaggtgcgccaatggaagaaggaggaaaacaaaggcagaggaaaccaatggaaatcaaggattggaagggattcaggaaagagaaccaatggaaatcaaggattcaaagggattcaggaaggagaaccaatggaaatcaaggattcaaagggattcagggaggagggaggggcctacagtgctgactgttgagtgcatgaggactgggcaacaaggtcattgcagatggagtggagttcagtaacagtggaggcaaaagccaggttgaagcagagtagggagagaatgggaagcgatgcaaagcaacaccagcaagattagatggctccttccagaagtttgactgtgaggagaaaagaaaagcgaggtgtacttgaaaggactaaagggtcaaaggagattttctgtttgtttatttgcttttttaatgggagagacatgcacaaatttatatgtgggggtgagaggagagaagaggctttaggaagtaaagaaaaagaaagaagaagtaggaatgggaatgctatgaaagaaagctatggagggctgaatagaattgcctttgatgggaagaaggagcttgggtagggatgagtgagaatgcacaggtgcaggtatcagggaagatagagctatatcagtaaataaagccaaaatgaaagcagaaaaagctatgcgtgttaccacaaagctagtgatgggaaactgggacctctgctgatgttatactcagataatcccaaagcctccaggactgggctggccaacagaaagaagaaggaagcccagactccaccttccctctttcttagaaatctcttgcaatgcatctgattgtcaaaatgcgaatcacagctgaagccctagctgcaaagaaaactgcaatgtaggaaagtacacaggaggagggtagagtggatgttgagtcccagtgttccatatccagccgtccatgttttatatatatatacacacacatacatatatatatatatatacaaatatatattataatgcatttttacataaaatataaaattataaaacaatgtataaaatatataaatataaaattctaataatatattttaaatttaaatatatgaagatatttttacatgtacaattattatgcattatatgttatatatatacacatatttttttttttgagagacaaggtctcactctgtcacccaggctgtagtactgtaatgtggtcatagctcactgcagccttgaactcctgggctcaagcaatcctctcatcttggcctcccaaagtgctgagattgcaggtgtgagccaccatgtcaggtctatatttattttttatatgtaaatgtaatgtatttagacatatatcatctttactgagatataattcacatctcatacaatttacccatttaaagtatacaatcaatggtttttagtgtattgacagaattgtgcaaccatcatcatgatcaatcttagaacatttttatcaccccaaaaagaaatcctggaggtggagcaagatggccagatagaagcctccaccaattgtcctccctcctgctgccttctggacagcaggcgactccaattcaaccagtcaaaaatgatataggttctgctatatcattttgagttctggtttctacctccacggctactgaactccactccatctgcaatgaccttgttgctctgtcctcatgctcttgacaggaggtggtgcaagatggccgaatagaagcctcaactgtctacacacaaaaaagcaccattgtaagaaccaaaaatcaggtgagtgatcacagaacttggttttaactttatatcgctgaaagaggcactgcagagggtaggaaagacagtctcaagttgttgccatcccttccccatccctggcagtggtcatgtggtacagagaatttgtgcatttcagagagggagagtagagtgattgtgggactttgcatcggaactcggtgctgccttatcacagcagaaagcaacactgggcagaactcagccaacgcccacagaggagcatttagaccacccctagccaaaggggaatcatccatcctggcggctggaagctgagttctggcgagcctcaccactgcaggctgaagtgctctggggtcccaaataaacttgaaagtcagtctaggccacaaggactgcaactcctaggcaagttctggtgctatgctaggctcagagtcagtgtcttactagggcatgaaccttgtgagataccagccagggtggccaagggagtgcttgtgctactcttcctccaaccccaggcagtgcagctcataactccaagagagactccttccttctgtttgagaagaggagaaagaagagtaaagagggctttgtcttgaataccagctcagctacagtaggatagggcactgggcagagtcctgaggcctgatgccaggccctaggtcctggatgacatttctagacatgccttgggccagaagagaacccactgcctcgaagggaaggacccaatcctggcagaattcgtcatctgctgactaaagagcacttgagccctgaataattaacagtggtagccaggtagtacacaccatgggccttggatgagactgtaagatgtgctggcttctggtgtgacacagcacattaccagctatagtggctatggagagagatcccttctgcttttctaaagcagagtaaaatggactttgtcttacagcataggtaccacctcagccatggtagagtagagcaccaagcaggcacttatggttcctgatcccaggctacgcccttagatggcatttctggacctgccctgggccagaagggagcccaccgccctgaagagtgagacccaggcctggtagcattcaccacaagcaggctgaagagcccttgggccttgagtgaacattggtggtatcctagcagtaccccacctttgaccctgtgggcctgtggtggtggtggccatggggagagactcctctgcttgtggaaagggaaagaaagagtggggaagattttgacatggggcttgggtgtcagttcagcagcagtacaacaccaggcaaattcctaaaatttctgactccaggtactggcttctagatagcatctctggacctccccagggctgggagaacttgctgtcctgaaaggaaagacatgagtctggctagctttactacttactaattgcacggctctagggccttgagcgaacataggtggtatccagatagtggtcacagtgggccttgacgagacccagggctaggctggcttcaggtctaaccaagtgcaattccagtggcggagacaacagaggtgcttgtgtcactcctgccccagctgcaggcagatcagcaaagagagataagctctttatttgggaaaaagtaagggaagagagcaagagcctctgcctagtaacccagagaattctttcagatctcatcaaagaccacaaggcagatcaattctgctattaagagagtctgatgctttcttgagtatgacagatacatttttcaactccagaatttctgcttgattctttttaattgtttaaatctctttgttagatgtatctgataaaattctaaattccttctttgtgttatcttaaatttcattgagtttcctcaaaacagctattttggggcacatgttctcaggacctcctgaaggctgtgtcatggaaaaaaaaaccccagctattttgaattatctgtctgaaaggtcacatatttctgtatctctgggattggcccctggttccttatttagttcatttggtgaggtcacattttcccagatgttcttgatgcttataaacgttcattggtgtctcggcattgaagaattaggtatttattgtagcctttgcagtcagagcttgtttgtacccatacttcttgggtaggctttccaagaatttggagggacttgggttttctgatctaaaattttggtcaccgcaactgtatctgcacttgaggcatcccaagcccagtaacactgtggcttttgcaggattggccaagcagaagaaaaaatcagtgagtttgaagacaggctatctgaaaattcatagttgaaggagtcaacagacaaaagaatgaagcacacctacaagaattagaaaataggctcaaaagggcaaatctatgagttattggtgttaaagaggaggtagaggtagaaagtttattcaaaaggataataacagagaacttcccaaacatagagaaagatatcaatattcaagtacagtaaggttatagaaaaaccaagcagatttaacccacaaaaaagactacctctaggcatttaatagtcaaactcccaaaggtcaagggtaaagaaaggatcctaaaaacagcaagagaaaaaacacaaataacatacaatggagccgcaatacatctggcagcagacttttcagtgggaaccttgcagaccagaagagagtggcatagcatatttaatgtgctgaaggaaaaaacttttaccctagaatagtatatctagtgaacatatccttcaagcatgaaagacaaatggagactttcccagacaaataaaaacagagagatttcattaacatcagagctgtctgaaggaaataaatgctaaagagagttcttcaatccgaaagaaaaggacgttaatgagccataagaaatcatctgaaagtacagaactcactggtaacattaaatacacagaaaaacacagaatattataacactgtaattgtggtgttgaaactattcatatcttaagtagaaagactaaaagatgaactaatcaaaaataataactacaacaactctttaaagacatagtagaataagatataaatagaagcaacaaaaagttaaatagtggaggatgaagttaaagtgtagagtttttattagttttctctttgcttgcttgtttgtttatgcaatcagcattaatttgacatcagtttaaaataatgggttataatgtattatttgcaagcctcatggtaacttcaaaccaaaaaccaacagatacacaaaaattaaaaatgagaaactaaaacataccaccagagaaaatgaccttcaccaaaaagaacacaggaaggaagaaaagaccacaaagcaaccagaaaacaaataacaacatggcaggagtaagtccttacttatcaataataacgttgaatgtaaatggacggaactctccaatcaaaagacgtagagtggctgaatgggtgaaaaaacaagacccaataatttgttgcccacaagaaacacacttcacctaaaaagacacacatagactgaaaataaaggggtggaaaaagatattccttaccaatggaaaccaaaaaagagaaggagtagctataactatatcaaaattatattttaagacaaaagctgtaaaaagagacaaagaaggccattacataacaataaagaggttaattcagcaagaaaatataatgattataaaaatatatgcacccaacactggagcacccagatgtataaagaaggtattattagaactaaagagagagatagactcaataaaataactactggatacttcagtaccctacttccagcagcggacagatcatccaaacagaaaatcaataaaaaaaaattggacttaatctgcactatagaccaaatggacctaacagatatttatagaatatttcatccaatggctacagaatatgtattcttctccttggcactgttctcaaggagagatatgttagcctacaaaaaaagctttaaaacactccaaaggattgaaataatatgaagtatcttctccgaccacaataaaatataactagaaatcaataacaagagaaattttggaaattataaaaacacatggaaattaaacaatatgcttctgaatgacctgtgtaccaattaagagattaagaagaaaattgaaaaatttcttgaaaaaataacaggaacaatatgccaaaacctgtgggatacagtgaaagcagtactaggaggaaagtgtgtagctataataagcacttacgtcaaaaaagtagaaaaacttcaaataaacaatctaatgacacctcttaaaaaactagaaaagcaagagcaaaccaaatcctaaatttgtagaaaaaagaaataataaacatcggagcagaaataactgaagttgaaatgaagaaaacactacagaagatcaatgaaatgaaaagttggtttttttgaaaagataaacaaagttgacaaagcttcagccacactaactgagaaaaaaaaatacagaagacccaaatgaataaaatcagagataataaaaggagtcaccaaaaccaatgctgcagaaatccaaaggatcattagtggctataatgagaaattgtatgccaacaaattggaaaatcaattaatagaagaaactgataaaagagcatggtggtgcaggatatggggtcagtataaataccaacgcatagtccctttgcaagagtgagggcccaagttaaggtaatgagttcggcttgctgagaggtagtggagatggggcacagcggtagcctcaatgatagatgtggaagatactatagcatagcctgcctttgctggtgtttggcgattaggcctggtggaactgccatcaataaaccaagtgtgatcagggtgaggaacaggaaagaaggaaacatggggaaatgaagtgaatgccaagtgtatcagagagatacagtcatgggggccaggtgtggtatcaggaataatgtgggaggccggattgaagtccaggccaggaacaatggtaattgtgggagactcaacaaagagtgagtacagctgaaggagccagggagcagaaagtgtatgtgtcaggtgtgaggaagaaaatagattttggaagttatgagaactgtatagagtgagttgagcaaagtttgtgattttgagggcctctggaagtattagggcagcagcagccaccgcatgcagacatgagggctaggctaaaacagtaaggtcaagttgtttggacagaaaggctacagggtgcggtcctggcttttgtgtaagaactccgattgcacagccctgcactttggctgtgtgtaatgaaaaaggtttggaatgagttagggagagctagtgtgggggcagcttctagggctgtttttaaggaacggaaaggagtggcaaagggatttaggatctatggggtcagctgggtttggttttgtgagtttacataatggtttagtcaggatggtaaagctaggtatccaaaggcggaagtacctaaccatgcgtaggaaggagaggagttgttttgtagaagggattggggtttggggaattagctggacatgatcagcaggcagagcatgtgtgttttcgtgaacaattatgctgagataggtaacagatgaggaagaaatttgggcttaactgaagtcatgggggctgtccgtgaagccttgcagcagtacagcctaggtaatttgttgagcctgatgggtgtcagggtcagtccaagtgaaagcgaagagaggctgggatgaagggtgcaaaggaatagtaaagaaagcatgtttgagatccagaacagaataatgggttatggaggggttgtggagggaggtattgaggataggagagtatatggctttggcatcacggggtggataggccagacaatttggttggtaaggccagatcctgaactaacctgtaaggcttgtccagtttttggacaggtaaaacaggggaattgtaaggagagtttacaggctttaaaagcccaagctgtaacaggcgagtgataacaggctttaatccttttaaagcatgctgtgggatgggatattggcattgagcagggtaagggtgattaggttttaatgggatggtaagaggtgcatgatcagtcgccaaggagggggtagaggtgtcctatacttgtggattaaggtgggggtatatgagaggaggatgcgaaggaggctttgaactggggaaaaagcagcaatgaggtgtggctgtagcccaggaatagtcaggaaagtagataatttagttaaaatgtctcgacctaataagggagctctaggcaggtggggataactaaaaaagagtgcataaaagaatgtccatgttggcaccagagttggggagttttaagaggtttagaagcctggccgtcaatacccacaacagttatggaggcaagggaaatacacccttgaaaagaaggtaatgtggagtgggtagcctccgtattgcttaagaaggggacggacttaccctccactgtaagagttacccaaagcatccgcgatggtccaggaggcttctgaggcgatcgggcagtgtcagtcttcagctgctaagccgagaagatatgggaaggagtcagtcagagcctcgggccagttggacagtccagtttccagtggggactcacatagatgggacacagcttaggaggaatcccaggctgcgggcattccttggcccagtggccagatttctggcacttgtagcaagctcctgagggaggaggttctagaggaacccctggcagctgcggttcaggtgtttggagttcttgtgtgctggagatgtggctggggtttgtctcacagcggaggcaaggaattgcaactcagaaatacattgctacttggctgcctctactctattattgtacacctaattaagtcctgttgtggggtttgagggctggaatttaatttttggagctttatttaatgttgggaacagattgggtaataaaataaaatgcatattgagaataagacagccttctgacctttcaggatctggggctgtaaagagtctaagggttgctcctaagcaggccatgaactgggctgggttttcgtctttaccttgagtagttcctttaagtttgtcttaattaacagctttgtaagctgcctttttaagcccttcaactaggcaggaaaccatgtaatctcgcctagctatacctggggaatttgcctgatagttccattgggatcttctcggggaactgctctaatgccttcatggaggtctggctcatgaagctggcagttatcagtgtgaaattgggctagagaaaaaactctttcccgttcatttggggagagggtagaagttaggatgacatttaagtcattccaggttaaactgtaagacagatttagatatcggaattccagtatatatttagtggggtctgatgagaaagagcctaaacgctggctgatttgggaaaggtctgatcgagaaaaaggcacatgtaccctgactatgccttcagctccagccacctctctaagaggaaattgttgggcaggtggggagggctagtcgtgggaacaaaattggaagccagaccggtgtgaggaggggaggtgattgaaggattttagggttggggagcagaggctgaggaagaattgggacctggcttggcctggcaaggagcagcctggggagaaggggagaggtcagatgagtccatagaaaagaaggattcaaaggactcatatcttggggtggagactgaaggaacagacaggagagaaagaagaaagatttgggacaagtctcattgggagcagagactagggagggaccgatgtgtaaaagaatgcctggacgtcaggcacctcacaccttttgcccatttttgacgaaaattatctagatcttgtaaaatggagaaatcaaaagtgccgatttctggctatttagaaccattattgagtttgtattggggtcaagcggtattgcagaagaaaataagacacttagattttaggtcaggcaagagttgaagaggttttaagttcttgagaacacaggctaagggagaagaaggaggaatggagggtggaagtttgcccatagtgaaggaggcaagtgtaaagagaagggtagagacacagagaaggcgggtggggagcagccctgggctgcaacgtgggtgagcagccaaagcaggcgtccccgcaattgacttgccaccaagggaatgtgggtgaatgaccaaggcaggtgtccctgcggagatcagacaccaatggaatgtgggtgaataatcagagaggcgtccccgcaatgattaaacaccaggggaaggctgccttcccgagtccgtgaccagcgccggagttttggttccacagataaaatgtgtctcctttgtctctaccagaaaatgaaaggaattgaaattaagagaagggagagattgaagcatggcaccaagattgaaaggagaaagaggttgagggatagtgagagaggttggagaagagagtaaaaagaggccacttacccgatttaaaatcggcgagatgttccttgggctggttggtctgaggacttgaggtcataggtggatctcttcacggagtgagggtgaagacaggggactggtctcctgaaggagtcccactgacccggatcttcggcaccaaatgtttcacgtgtccatgtgaagagaggaccaaacgggctttgtgtgagcagcaaggctgtttatttcacctgggtgcaggcagactgagtccaaaaaaggagtcagcaaaggatggtgggattatcattagttcttatgggttctgggataggcagtggagttaagagcaatattttggggacagggcgcggatctcacaaagtacattctcaagggtggggggaattacaaagaaacttcttaagggtgggggagattataaagtacattgatcagttaggttggggcagaaataaatcacaatggtggaatgtcatcagttaaggctattttcactttttttgtggatcttcagttgcttcaggccatctggatgtatatgtgcaggtcactggggatatgatggcttagcttgggctcagaggcctgacatgcaccaacagtgaccaagctgagagtcaaataaagaactcaaccccttttacaatagctgcaaaaaaataaaatacttaggaatatacctaaccaaggaggtgaaagacctctacaaggaaaactacaaaacactgctgaaacaaatcatagacaacacaaatgaatggaaacttgtctcatgctcatggatgggtagaatcaatattgcaaacatgactgtactgccaaaagcaatctacaaattcaatgcaattctcatcaaaataccaccataattcttcacagaactagaaaaaacaattataaaattcacatggaaccaaaaaagagcccacatagccaaagcaagactaaataaagataacaaatctggacgcattacattacctgatttcaaactacactataaggccataatcatccaaacagcatgatactggtataaatataggcacatagaccaatggaatagaatagagaacacagaaataaactcaaatactcacagccaactgatcttcgacaaagcaaacaaaaacataaagtggagaaaggacacccttttcaacaaatagtgctgggataattggcgagccagatgtaggagaataaaactggatcttcatctcaccttacacaaaaatcgactgaagataggctgggcacagtggctcatacctgtaatcccagcactttgggaggccgaggcgggtggatcacgagctcaggagatcgagaccatcctggctaacatggtgaaaccccattttgtattctctatctgggtggcaatcatggtcattgtggtagccttaaactcctgctgtccctgcccccttctaccacttgagagggttgagatgggcccaagagagcactaaggaaagatgtatagcagcactaaacagattatccaatgatggaaatttaatcattctacccatctcgcctcatcccacttgttctccagagacaaatacttgcagtgtagcaggatgagccgcagacaaaactcctcagacaccaagttaaagaaggaaggagtttattcggctaggagcatcagcaagactcctgtctcaagagctgagctccctgagtgagcaattcctgtcccttttaagggctcacagctctaagggggtccgtgtgagagggtcgtgatcaattgagcaagcagggggtatgtgactgggggctgcacacaccagtaatcagaacaaaacagaacaggacagggattttttacaatgcctggaatctatagataacataaacggttaggttagggatcgatctttaactaccaggcctagggtgtggtgccgggctgtctccctggagatttcatttctgccttttagtttttacttcttctttctttggaggcagaaattgggcctaagacaatatgagggatggtctcctcccttagcagcagtgcttccaacattttttccagtattaacctccatatttctaagtaaaataaactcctacttattttatgatttctcaattttaataatcatttgctgacttcatatcataaaagttgaatattcagctcattatttctcattttcctcatctcttctcgatagagactataataattttggttaaattgggattcagattattagaaccatgaaatgttgaaccaagtactataattaagtttcatttcttttgtaccttttttatttttctgagagatagtacttgttttccattgctccatttgttaaagtacttaccacttagtcttaatctttctgcattctcaaatagtctctcgacacaattttccacatagtcaaacacctaacatatcagttcccctttctaattaaaaataaacaattcccttcattctgctctaatctgaaccaataactccctagacttgttcacacagctctcatctgggacttttcttggctacatcctgaaaattccctttgcgtctctcctctgttcaatcccctaacttctggaccctgggtcagacaccttcctgatagagtatatcctgcatcagcttcccagaaaaagagtttatgaggtcagtgtgagtggcctgatagtttgggtaggtctataattctaggttgaaaatcatttttcactcagaattttgaaggcattgtggtgttatcttctagtgccagtgtggctattgatacctcctggtctttatatgtgatcggatttttctctctggaagttttggaagcttttcaaaaatcattggttttctggaattagtgccttgatattggtctttgcatgttccttctgctgagagctgggtaggccctttcaacctgtagttctttcagttttgagaatttttcttgaattatttctgcattttccctctccagttcatccttttccaaaacatctaaggattagatcttggacctcctggactggtattatatctttcttttctctctcattaccatctttttgactttttgttttgagtgatttcctcaactttattttctactgctcccactggatttttttttattttagtgatactattttaatttccaaatgttctttcttattgtttcttttgtacaatgtcttgttttctttcattgatgcaataccttctttctctgaggattactgtatgtggctattagggttgagattttttccctgtaagttttcttctctatatctattttctctgaaatgcttttttggggggatatttttctgtttgtttttctagttctgactagagacccttctcaaatgtgcaatgatctttggctgttactggtttttaagagcaaggcaccaaagaacagtccaagggtgggatttattagcttactatagaggattgggtaattgacttccttcactcatctaactgactcccagatgtcagtatctgcaggtctgttctcttgggccactcagagaaagatcttacaaatgcttgcctggttaatataaacctgagaaatgcatggggatgaggagctgcagacctcactgttcaatatgtagactttcacttaacctccatgtttgcatccagccttgcacagtacatggtgttctgagtccagggattttctggttcaccttcttcaaaaatgaactcactagtattggaatagtgaacctgaggtctaactaatatatttgcagatttttctaccagtcacgcagttttcagctctactctcacacctagtgtccatggaaatcggtggccccaatttctaagctttccaaagttttgtggggcaaaatcctttctctctaactgccaacttgacatctctactttgatatccaataggctagctaatttaacatatccaaagctgtctcctgatattccccaagtgggttcatggcatattttttttccagttgctcaggccaaaaaccttggagacatctttgcttcttctctcacatcccacatctagtctctcagcaaaccctgttggcttgctttcaagatatactgagaacctgatcttttgtcatctccattgttaccaccttagtgaaagccatccgtatctctcacctctattgttgtagtgatcttcaaactctatccatgcttctggtctcactcataagtggaaattgaacaatgagaacacatggacacagggaggggaacatcacatattgggcctgttggagggtggggggcaaggggaaggagagcattaggacaagtacctaatgcatgtggggcttaaaacctagatgacgggttggtaggtgcagcaaaccaccatggcacatgtatacgtatgtaatatacctgcacgttctgcacatgtatcccagaacttaaagtaaaattaaacaataacaataataataacaaaactctagctatgcttcttttcttgccccctaagtctattctcagtacggcagccacagtgatccacttaaaatgtaagtcagaacatgtcaggtctctgctcaaatcctccaatggtttcccagcttacacagagtaaaagccaaagcccttactataatctgcagggtcctacataaccttctctcacctgttgtctttctcattcatatctcattcctacccaccatgctgactccactgcttccacactggtctccttgctgtttaaggaactaatcgtgcgtgctcccactacagaagccagctacattagccattcactgggaagtctcctacccaggaatccgtgtgaacagtttcttcacttctttcaggtcttttctcaaaagacaccttctcagtaaagcctttccaaagcaaccaatctaacatttctgcccaattccatcatattctgtattctgcgtccatgctttagtttttcttcataatactatatatttgatttgctttttatctatgtttcttaactagaatatagctccacgaggaaaaacatttttgcctattttgtttactgctatatccctggtgaactatatgccaacagcaaacaatctgacaaagaaatcaagaaagtaatcctgtttacaatagctacaaataaaattaaatacctaggaattaaccaaacaagtgaaagatatttacaatgaaaactataaaacattgatgcaggaaatcaaagaggacaccaaaaatggaaaaatatttcatgttcatggattgaaagaatcaatattgttaaacagtccatactacccaaagtatctaccaattcagagcaatccttatcaaaataccaatgacattcttcacagaattagaacaaacaatcttaaatttatatatatggaactacaaaagacccagaatagccaaagctacctgagaagaaagaataaaactggaagaatcacattacctgacttccaattatactacagagctatcatcaccaaaacagcatgatactggcataaaaacagacacgtagacctatggaacagaatacagaacctagaaacaaatccacatacccacagtgaactcattttcaacaaagatgccaagaacacactttgggaaaaggacagtctcttcaataaatggtcctgggaaaactggatatccatatacagaagaatgaaactagatcactatctcttgccatatatgaaaatcaaatcaaaatgaactaaagacttcaatctaagacctcaaactatgaaactactacaagaaaacattgaggaaactctccaggacattggactgggtaaagatttcttgagccatacccctcaagcacagacaacctaagcaaacacagacagatgggattacatcaagttaaaaagctcgtccacagcaaaggaaacaatgaacaaagtgaaaagacaacccacaaaaagaatgggagaaaatatttgaaaactacccatctgacaagggattaattaccagaatatttaagaagctcaactaactctataagaaaaaatctagtaatccaatttcaacgtaggcaaaagatttgagtagaaatttctcaaaaagaagacatacgaattgcaaacaggcatatgaaaaagtgctcaacatcattgatcatcagagaaatgcaaatcaaaactacaatgagatattatctcacctcagttaaaatagcttttatccaaaacacaggcaataacaaatgctggcaaggatgtggagaaaaggggaccttcgtactattgatgggaatgtaaattagtacaactactcttgtactaatagtggagaacagtttggaggctcctcagaaaactaaaaatagagttaccatatgatccagcaatcccactgctaggtatatacccaaaagaaaggcagtcagggagaaggctggtcaagatggctgactagaagcagctagtatgcgccactctcatggagagaaatagaaacggcgagtaaatacagcaccttcaactgagtcatccaggtataagcactgggatttatcaggaaaacaacttaacccacagagaatggagaaaagcaaagtaggacattagcctgcccaggagtgacacagagctaggggagcctccgtgagtgagtgaacaaccccagagacccatgtgtccccgatatatttttgcaaccctcaggtcaggagatcctgttatgaacccactccagcatggtctgcattctgacacgcagagctacgtggaattttggcatagaagccactcaggcatacatggatccccaggagctttagataactggacttcctggcaaacgcagctgtaactctagcaaagtgggaagttctacccctagaaaaggagctgaatccagggggctgagcagtgaccatctgtaggccctgcttccatggcaccttgcaggataatgcccactggcttggaactccatccagccactggtagcagcgttatacctccctggaacagagctcccaggaggagggacaggccaccatctttgcttttttcacagccttaggcattattgccttcaggatctagagagtctgaggttactagggactggaggcaatcccattcacaactgccacaaagagaataaaatacctaggaatacagctaaccagggaggtaaaacacctctacaatgagaattacaacacactgctgaaagaaaccagagatgacacaaatggaaagacattccatgctcatggataggaagaatgaatatcattaaaatggccatactgccaaagcaatgtacagattcaatgctatttttatcaaactaccaatgatattcttcacagaactagaaaaaactatcttaaaattcatatggaaccacaaaagagtccaaatagccaaaacaattctaagcaaaaagaacaaagcatgaggcatcccattaccttacctcaaactatactacagggctacattaaccaaaatagcatagtactggtgcaaaagcagacacatagaacacagtagagagcttataaataaatctgcacacctacaaccacctgatctttgacaaaactgacaaaaataagcaatggggaaaggacttcctactcaataaatggtgctgggataaccagctagccatatgcagaatattgaaactcaaccccttccttacaccgtatgcaaaaatcaactcaagatggattaaagacttaaaggtaaaacccaaaactgaaaatcctgaaagacaacctaggcaataccattctggacataggaaatggcaaagatttcatgatgaagatgccaaaaacaatcataacaaaagcaaaaattgacaaatgggatctaattaaattaaagaatgtctattactcaacagagtaaacaacctacataataggagaaaatatttgcaaactgcatctgacaaaggtctaatatccagcatctataaggaatttaaacaaatttacaagaaaaaacaaccccattaaaaagtgggcaaaggatatgaacagacatttttctttttttttttctttttctttctttctttttttttttttttttttgaggtggagtctttctctgtcgcccaggctggagtgcagtggtgcgatcttggatcactgcaacctctgcctcttgcgttcaagcgattctcctgcctcagcctcccatgtagctgggattacaggcatgcgccaccacacccagctaatttttgtatttttagtagagacagggtttcaccatgttggtcagggtggtctcgaactcctgacctcaggtgatctgcccgccttggcctcccaaagtgctgggatgacaggcgtgagccaccattcctggccaaacagatacttttcaaaagaagacatacgtgtgtccaacaagcctacaacaaaaagctaaatatcattgatcattagagaaatgcaaatgaaaaccacaatgagatatcgcctcacaccagtcagaatggctatcgctaaaaagtcaaaaaataacagatgctggtgaggttgcaaaaaaaaagggactgcttatacactgttggtagaaatgtaaatttgttcaactaccgtggaaagcactgtggctattcctcaaagagctcaaaacagaactcgcttttgacccagcaatctcattactgagtatatacccaaaggaatataagttgttctaccataaacatacatgcagacttatgttcattgtagcactattcacaatagcaaagacatagaatcaacctaaatacccgtcagtggcagattggataaagcaaacgtggtacagaaacaacacagaatactatgcaaccattaaaaagaatcagatcatgtcctttgcaggaaaatgcacagagctggaagccattatccttagcagactaacacaaaaatggagaaccaaatacctcatgttctcacttataagtgggagctaaatgataagaacacatggacacaaagagggaaacaacagacatgggagcctacttgaggctgaaagttgggaggagggagaagatcagaaaaaataaccattgggtactaggcttagtacctgggtgatgaaataatctgcaccacaaacccctgtgacacaatttacctataaaacaaacctgcacatgtacccctgaacctagatacattttttttaaaaaagaaaggaaatcagtatatcaaagacatatccacactcctatgtttattgtagcactattcacaatagccaagatttgaaagcaacctaagtgaccatcaacagatgaataggtaaagaaaatttgatagatatacacaatggggtactattcagccatgaaaaagagttatatcctgtcatttgcaacaacatggatggaactgatagtcactatgttatgtgcaatataccaagcacagaaagacaaggttcacatgttctcacttatttgtgggagcttaaaatgaaaacaattaaacttatagagacagagagtagaaggatggttaccagaggctgggaagggtagtagtgggtggggagaagttggagatggttaatggctacaaaaattagttagaaagaatgaataagatctagtatttgacagtacaaagggtaactacagtccatcataatttagttgtacatttaaaaataactaagagcagccgggcgcggtggctcacgcctgtaatcccagcactttgggaggccgaggtgggcggatcacgaggtcagcagatcgagaccatcctggctaacacggtgaagccctgtctctaccaaaaatacagaaataaattagccaggcgtggtggcgggcgcctgtagtcccagcacttgggaggctgaggcaggagaatggtgtgaatccgggaggcagagcttgcagtaagccaagatcgcaccactgcactccagcccaggtgacagagtgagactccatctgaaaataaataaataaataaataaataaataaataaataaataagagtataattgggttgtttgtaaaagaaagtataaacacttgaggtgatggatacccaatcccaatgtgaatattatgccttgcatgtctatatcgaaatatctcatgtatttcataaatatatacacctactatatacccacaaaaattaaaaattaaaaaaatttctcatctccaagttactccccaactcattgcaatcataccgatattcccataaataataactataaattctggacaaggtaccacaataaacaacctgaatgcactggaggataaaaaaatacagattctggagggagtcaacacttaagggaactgcactacccaacgcttgtgaaaatcccaacattagttgacacgtggaagcaggaaactgtattgagtgagtttctattttcacagcttctagtataagggcagagcacctaggctatctaaagctctaatagggaagtcactgtctttctgtcctaaagaacctgaggacaaccgcagcagctggaaagtaatggtgaaatctcagaaaggagagtgcagagaggggaagccttaaattctgcgaataaactctgcccaaatccctggatgacccctgaattacatacacaggagagaagttctaagtaacctagttaaaaatctaaactgagtttgaggagatgaatatctcaattatactgatttaattattacacattgtatacaggtataaagatattacatgtactcccaaaatatgtgtaactattatatgttctttttttttaaagaacacagaaattttagtcaagtaaaataaagaaattttttttttttttttttgagacagagtctcgccctgtctcccaggctggagtgcagtggcccgatcttggctcactacaacctctgcctcctgggttcaagcgattctcctgcctcagcctcccaagtagctgggactacaggcatctgccaccttgcccggctaatttttgtatttttagtacagacggggtttcaccatattggccaggctggtcttgaactcctgaccttgtgatttgcctgcctcggcctccaaaagtgctgggattactggcgtgagccactgcacccggccaataaattgtatcttgatcttggaaagaaacaaaaagagcccaaattgagacttgagaatcaaagattgcctttgcatcccgccagttaactgcctgcaacaaacaaacaaacaaaaatcaatggttttcagagggagctaaaagaagccagcatctatacaacataatattcacaatgtctagaattcaatcccaaattacttgaaaagcaaagaaacagataaatgtgatcccttctcaagagaacatacaatcaaaagcccaatccaagatgacccatatgttgtaattattagacaaggattttaaaacacctgttgtaaccatgcataatcatgtaaagaaaaatatatatctgtaataaataaacaaatggaaaatctcagcagataaataaaaactatacaaataaaccatgcggaagttctaaaattgattaaaatatctaaaattaaaaattaacagcagttagaagatgacagaggagtcagtgaatttgaaactagatcaacagaaattatctaatctgaagaaaaaaaataaaatagaagagatcctcaacatcaaaatgtctaagacacttttaatgagtcccagagaaagagacaaagaatggggcagaaaaaaatcttgcagaacaatggctgaaattttccccaatttggtgaaagacattaatttacaggcacaagaaattcagcaaaccccagtcaggataaagatgaagaaatctatgtgtagacaaatcattatgaaactgctgaaaaccaaagataaaaagaaaacctgatgcctgtcagagaaaaatgacagattacatacaggggaatgacaactcaaatgaccatgtacttctcaccagatactatggaggccaaataacatttgtaatgtactgaaagaaaaaataaactgtcaacccagaattctacttccaatgaaaatagccttcaagaattggggcaaaataaaggaattttcagataaaagaaatctaaaagaattcattgccagctgggtgcagtggctcactcctgtaatcccagcactttgggaggctgagatgggcagatcacctgagatcaggagtttgagaccagcctggtcaacctggtgaaaccctgtctctactaaaaatacaaatattagccaggcccggtggtggatgcctgtaatctcagctactcaggaggcgaggcaggagaatcacttgaacccaggaggtgccggttgtagtgatccaagatcatgccattgtactccagcctctgtggcagagtaagactccatctcaaaaacaaacaaacaaataaacaaaacaaaacaaaaaacaccaccaccaacaaaaagaattcattgccaaaagacctacactacaaaataaaaagtgctttaggctgaagggaaattaaaatgtatggaaagaccttcagtaaaaactctggacactaaagctcaggtgagctacctggcaggtgatcatacatcaatgtgctaggaaggtgatgcatccccaagcataaattaaaatggaattcaaaaaaatattcaaagaatccaaaagaaggcaagaaaagaggaacacgggaacaaaacacaagaggcatacaggaaaaatgacaataatgttgcagacctaaattcaaccatatcgacaattatattaaatgttaatatactaagcactccaattaaaatacagaattggaccctgttcacaagatggcgccaaaagcgaagaaggaagctcctgcccctcctaaagcagaagccaaagcaaaggctttaaaggcagtgttgaaaggtgtccacagccacataaaaaagaagatccacaagaaaagaagatccacccaccttctggccgcccaagacactgtgactcctgaggcagcccagatatcttcagaagagcgcccctgggagaaacaagcttgatcactatgctatcatcaagtttctgctgacccctgagtctgccatgaagaagacagaaggcagcaacacactcatgttcattgtggatgttaaagccaaaaagcaccagatcaaataggccgtgaagaagctctgtgacattgatgtggccgcagtcaacaccctgatcagcctgatggagagaagaaggcatatgttcaactggctcctgattacgatgctttggacgttaccaacgaaattgggatcatctaaactgagtccagctggctaattctaaatatatgtatatcttttcaccataaaaaaaatatggaattggaagtagctccccaacttactgcttgctgaagaaaaggcatagatcatccattcccattgcttccatactcatatgaaatatttggtatatatctacccaaaagtaatatgctgttccactcccctgtactctgccttctgcctcaaatgtccttcctatctcataccaccctcacctccagcattcaacacacacacacacacacacacacacacacacatttagactccctcatgtcttacctttccatgaaggtgatatgatctgaccactccacttactccaattaaaatagatcatatctatgcatgggtgagattatatcttgctattcaagctcactaggagctgagacttcattttgtttgttattgtagcccctgggccaggtgtatataggctatttagctatcaaaaacattaatcagcaatcaaaattaagtagtgaatatagtaggctgttctccacgaatacaatttgtaataacaaacttgaataggggagtaattcaacccagactatgccctctgctttataaaataatatcctgccaacttggcgtgacattgaatttttttttcctgacaaatactgacatatttgctcaaacaaattaatatccttcctttgattcgttttgttttggaggaaataagttcacatgtcaatgtaaaagctgatccttacaacctctcttccaaatgaatttttgtatcttcatgataacaagataattaaggaacagtaaacttttctttaactttgtctttttctttttagacataaccctggccttctgcatggagccgtcgctactgagatagaaaaacaatgatgagctgctaagtatttaacagccagatcttggggatggggagatactcgatttgtagcatttgcccatttccacggtttaaatactctcactatggccaattttaaggtatcagcatgaccttataaatggaacattaagaagagatggacaggtcgggcccagtggctcatgcctgtaatcctagcactttggggggctgaggcagaaggatcacgaggtcaggagttcaagaccagcctggccaagatggtgaaaccccatttctactaaaaatacaaaaattagcctgatgtggtggtggacgcctgtaatcctagctactcaagaggctgaggcagagaattgcttgaacccgggaggtggaggttgcagtgagccgaaatggcaccattgcactccagcccgggcgacagagcgagactccttctcaaaaaaaaaaaaaaaaaaaaaaaaaaaaaaagaagaagaagaagaagaagaagaagaagagatggacacaatatcttggagccagtgtgaatcattgtaagaaagaccacgtgatgtcaaggacagggtaggaagaaacataagtttccatttttaaaaattaaaacactagttattccctaaaatgagagtctgagtggctgttcattaccacaacttaaccatatgagtatgttcaccccaaattctgagtgaaaagaccctgaagctctaaactttttctctttcacctcccccgctccaccataaaaagaaacaacaaaaaaattgacatatatggtcatttgtcctgagttccatgagatttgcagcaaccaaggggaccataccatgatcaagctattaaaaaattggttggatgcagcggcacatttctgtaatctcagcaccttggaagaccgaggttggaggaccacttgaggccagttcaagaccagcctgggtaacatagtgggaccccatttctacaattttttttaaagttagctaggtatggtagtgtgtgcctgtagtctgtgtgaaggcaggaggattgcttgaacctgggagttcgaggctgcagtgagctatgatcaccactgcactccagcctgagtgacagagacagacttcatctctttacccaatatgtgtaatctgggaagaggagaaggctcataacactcacccttgtaaacatcagggaagagaccttgacatttggactgtgattgctgattggacgggaatgggttggcaggggaagtgggtgagatgttttaaccaggaaaaagaaaaaaacaaaaacaaaactatgaatgtgtgaaaagagacttctcaaagaaagaaaggaagagaaaagtactggtcactccccacacagacagaatgccatggagttgctctttcttgccatgagtttaatgacaagcttccttccccttcatatgccaactaagcagcagccagcaggtcattccccgtctttgctgcccagccaggcctagagtcttccccaaacacagtcacagatattcccaggcttgaatgccatccagagactagtcatctgatgcaatttcctgtggtctgacaaacgaactcccatccaaacacgttgtgcttggggagtctgactatatgatcacatctcccaggactcaggcccactctgaccacaggattcttctaaagacaccaccgacagaagtgtgtgcaattgcaccatataatttttgtctgggaagtgaaatatctctgtcgttacatcatcttccttagcatagtgatcccttaaaagaagaaagcctaaataagatcccttctcaaagccaaactattaaaacaatcctttttaaatattctttcctgtcttccatgctgtacaagtacagctttcacacaatttctcttctgatcttcaaaacaatgcacggaggggtgtattattcctgtgtcctagtccagccaggacttcctgctcccctttccccccgattcctgcaaaggtgacatggccagcccggccaattcacgtctgagagactggcttcctgtgacaaccttcacccccctcccctgacccacaggcctgacacaaagagactgccggaaactccccacaacggccaagtgggtagccacagtgtcctggaaaggaattctaagcccacaacagagcatttctcatctagctgttttttgtttttttttttttaaatgggattggggttggcgaccagccaaagacgggtggcagaatgatgaaatcatacaagcccacagcaccgattgatgtcgtagtggaaatggggacaggcttttgtgctaaccagagtgttcctacatacactctctgattaataatagtgatggcccaggaacagccgtgacagtcaaagagaaacattgctgtatttgtaacattccatttttttaaagagtgtatattcatatattctttatgaaatctaagttatcttgagaaatgaaaagaaaatggccattgctgccactttgagagccctccgactcaggggtgttgtgtgggttgggggagatttccaactccctgcttaattatctcaaaacaccccatccattcgggtcagccagcatttgactgcctgctactgcgaagctcaatactgcactctgcctaataagcacaaagcccgcgggtctctccaggaaggcaggggtggtgggtcagaaagagctggctctcaaatcgcccatgcctgtgattggatggggaggagttgagacaatagacacacagccaactaaccaaagccagagacaaaggaggtagattctagatcagtgttggcataggagttggtcctgaagaactgctgggattttgatgaggaagggaagggttggcgtgggtgggacagtctataggaggaaacatcttggaagaaaattaggatgtagatgagaagcaacttatggtcacttctaattccactcctatcccctggccacacattccattcctctaaggtgtccaatctatacacccctgccaccacccctatcccatctcagcaggagacaatatgtgaaaagaaagttcttcatttttccttcttttccatttctttcttcctgtctttctttcttttttttttttttgtaacagagtctcgctctgtcgcccaggctggagtgcagtggcgcgatctcggctcactgcaggctccaccctgggttcacgccattctcctgccttagcctcccgagtagctgggactacaggcacccgccacctcgcccggctaattttttgtagtttttagcagagacggggtttcactgtgttggccaggatggtctcaatctcctgacctcataatcaacccgcctcggcctctcaaagggctgggattacaggcatgagccaccgcgcacagccctttttttttttttttttttttgagacagagtctcgttctgttgcccaggctggagtgcagtggtgcaatctcggctcactgcaacctccacctcctgggttcaagcaattctcctgcctcagcctcctgagtagctgggattataggcaagcactaccatacccagctaatttttgtatttttagtagagacggggtttcaccatgttcgtcgggctggtctcgaactcctgacctcgtgatccgcccacctcggcctcccaaagtgctgggattacaggcatgagccaccaagccaagcccactcgtttttcattcttgatattgacagactgcccagagacagacaggagtgggtagtgagggtcagaaggattaaggagcttgcctagccgatgaggaagggaacaagataagatgcaaacctcagtctctgactctcagccaagtgctcactaccccaactagctgtcaaatgaggtggatggggccttggttaggtacatagacacctgagtcatatcaacctggtgtgaatcccagctctgatgttgagcgattggcctagcctctctctgcctccattttctcttttttcatttcatttttcttttttgaggcagagtctcactctgtcactgcctctgttttccatagcaaaatggagttaataatgcttacatgagggattaaaacgaagacaatgcctacctaatgcttagaatggtgcctggaacataggaacaatgttgaaacagtctttcattcttccctcctatcactgtgatcatcagtaccaccacacactgcttctcatttagtgcctgaattttagagcctgcctggaggctggagccctgcctggacatttcccttaatcttgttatcctcctcagagaggcggcacccaccccattggcagacgccacgggaattctctgggcctgcttgtcatcactccagatgttgtttagagttcttctgttagcacagctgtttctagggtctggaaaaactctaaggacccccaggaggatacacaccagattgggtctgggctcacaccaccctgcatccccagagcctccctggacgctgtttgcaaggtcctcaccgcctggaagtccaggagccatttttagggaacagcattcaagctcaacatggcaagttccctctttcctgcaggggaggaccagaagggagccggagatgggggagaagggtgggaggtggatggtttggaaaagggatggagacccagacggagagaagccagccagccagggtgagggaacaagctgctgtgctgcccaggagaggcctggcctcaggctgccagcctcagggaggtagatgcggctgtgacagcagcaaagaatgacggccaagggcgacagcaggggctggccatgctgtaaaggggcttcttgggagggtccagcctcaggaatcaaggggaactcctgagccgagaattctgaagatctcctccctccctgaagctgtgggctgggccatcggaaaactttcagttttgtttccttgcctgcaagaaacgaaactcaaccgaaagcctgcagagagcagaacatggaaggagacttctcggtgtgcaggaactggtaagaaagtgctttctccagcggcagacccgggctggcgagggagagacgtagacgacatagggctgtttctgaagggagcagaaagtggttcctgcataagaacacttaggaggacaagcagctggagaccgtgggccccaagggtaggagggtttaaacttggtaatctctgggtgggggtgggcagcattacctccacttcactgcagcccctttcccccaaatgttaggctttctgggacagttctgaagccaaatagcccggccagtggtcccaactgggctactcatacttgtgagaccttgggtcctaatttggggttctgatactatgaccttcacacccatctgtgaaagaaagtgtcccacggagattctccaggactactctcaccctccttggaaagggagccgtggggcggggcaggggggacagagcagggggctgggaccacacctctaacgggagggggggcgcggaatctgaccgatcaaaaagccccattctcaaagctccctacctgtgacagggacctgagtggaccctccccagagagctttgctccagccagacccttcaagtactctggtttctcaaccagcccaggaagagcagggggagaaggggccaggtcaggcagaggagagagagcagaggaagggaagatgatgctgcctgtgtgcccgctgcctgggcagaagaggagtgaggctttgacagtccctctcggagcacgtcccctgtgccaggaacatgggcatgtaactcttctcgtcccctgggcctttacggctacagccaccccatttcccttctcccaagctgccacaagcaagagctgatggaaatgaaaggagtcatttctttctttcttcttcttttttttttttttttaagatggagtttcgcttctttttgcccaggctggagtgcctggagtgcaatggcgcgatttcagctcactgcaaccttcatctctcgggttcaagtgattctcctgcctcagcctcccgagtagttgggattacaggcgtgcaccgccatgcccggctaattttgtattgttttagtagagatgaggtttcaccatgttggccaggctgatctctaactcctgacctcaggtgatccacccgcctcggcctcccaaagtgctgggattacaggcatgagccaccacacccagccaaaagggggcacttcttggcaaaaaggacggttagagaaaaatgccctgcccaggaagtgggaggctcagaacccttccttcactgtggtctccaggaagaacctcggagtctctgtgagttagcgcaggtgaacctgaaggcaggggagacttgggaagctctcgctttggagattttggaagttggcatggccctggcaggaagcgtgagcctagcagggctgcgttcctaacactgtggaccaaacaggggcaccagaaaacaagaaaaaagattcaagagaatttggcacttctctcaaattatttaaattgaaataatttaattatttacattatttaaaatgaaatgtttcattttaaaaacagccttatagaggtataattgacctacaataaacctcacattttaaagggtagcaattgataagttttggcctaagttatatacatccatgaaacaccatccccgtaattgagataatgaagcttcctgtcaccccaaaagctccccatgcccctttgtaattcctccctcctgctccttcccatgccctgccccagcaatgtaagagctctgtagatcatccttattcttattagatgctgcctcactgttctgacttttggacccacacagggagtgtggggcaggtggtgtcatcatcatcacatgttcagtgcttaaggcctctggagatctagccctgggtatgaaatacagctccatgttttataatatgaaaataagtctatttttctatccccacaccttgaccctgtagtaaaagacatgtagtctctgccaacttcaccctccatgaggcttactgcctgcggttcctggtcctgtgtccggagtgtgaggagcctgtccccaaggaaaccatggaggagcactgcaagcttgagcaccagcaggtgaggaggcggcagggaggatggggtctgagagtcaaggtgagtgttcagtcctccctgcaggtgagatggggtctgagagttgggggacgagggtctagtcctccctgcaggtgagatggggtctgggagtcaaggcaagtgttcagtcctctctgcaggagagatggggtctgagagtcaaggcgagtgttcagtcctctctgcaggtgagatggggtctgagagtcaaggcaagtgttcagtcctctctgcaggtgagatggggtctgggagtcaaggcgagtgttcagtcctctctgcaggacagatggggtctgagagtcaaggcgagtgttcagtcctctctgcaggtgagatggggtctgggagtcaaggcgagtgttcagtcctccctgcaggtgagatggggtctgggaggggcaagtgttccatcttccctgcaggagagatggggtctgggagtcacagagtgggtccagtcctccctgcaggagagatggggtctgagagttgggggacgagggtctagtcctccctgcaggtgagatggggtctgggagtcaaggagagtgttcagtcctccctgcaggtgagatggggtctgggaggggcaagtgttccatcttccctgcaggagagatgggatctgggagtcacagagtgggtccagtcctccctgcaggagagatggggtctgagagttgggggacgagggtccagtcctccctgcaggtgagatggggtctgggaggggcaagtgttccatcctccctgcaagaaagaaggggtctgggagtcagggaatggctccagtcctccctgcaggagagatggggtccgggagttggggtgagggctggggacttaaggcaagggtccagtcccccaggcagagactcacttgagggccatgggaagtcatttagcccctccacacaaagcccatggaaaggaaatgttaatcctgcctttttcatgctaatctgagtctacctccagttttcctatttccaatcctttccctacaggcttatggatctggcataggcaagaggttctggtttcaggaaagactggctgttctcttgagatctgtaaagagaggatgtgaaaaaggaaggtcctggaaggcagtcagatggagccctgtttcccgcctttccatgtccattcctcctggggcccctgatctgtctctctggagatactcaagctcaggcagccgttgccaactcagactggtctgacaaacacttcttgaacactgggcggggtgctagagagacactgaggtagccacatcggatccctgccctctgggagttcacagacccaaacccggaacactgtgagccaaagtggatgtggggcaggccctgggtgctgggtggacccacatctggtgtgtgtgtgtgtgtgtgtgtgtgtgtttaggttgggtgtacgatgtgtcagcagagcatgcagaagtcctcgctggagtttcataaggtaagagccccatgtgatttctcctttacagccaaatagaccaacctgagaaaaggagaggaaggggaaacgggaggccagtaatagagatttccacctgaccactcttttcaccccattaggcttggagagcagtggagaactagcccaccgcataacacaggttctcctgtcccccagatactgatcagaagggttttccatggtccatgagtccatcagagctcagatcccccgaaggcagtcccgcactctggcccttctcatctgctttctcgtattggccctaattccctagggagatgggcacaagtccttgatctgcctacagtcaaagaggccagtgatcggccaggcgcagtggcacacgcctgtaatcccagcactttgggaggccaaggcgggtggatcacgaggtcaggagttcgagaccagcctgaccaacatggtgaaaccccgtctctactaaaagtacaaaaattagctgggcgtggtggcacacgcctgtggtcccagccacttgggaggctgaggcaggagaattgcttgaacccgggaggcggaggttgcagtgagccaagatcaagccactgcactccagcctgggcaacacaatgagactctgtctcaaaaaaaaaaaaaaaaaaaaagggccagtgatcatgcccttcctgctgcctcccacaggccaatgagtgccaggagcgccctgttgagtgtaagttctgcaaactggacatgcagctcagcaagctggagctccacgagtcctactgtggcagccggacagagctctgccaaggctgtggccagttcatcatgcaccgcatgctcgcccagcacagagatgtctgtcgcagtgaacaggcccagctcgggaaaggtaagcacacaaactggggtggaagagagacgttccaagggccagagcctttcctggatgggatgcaaggaagggaagctctcaacaggacggatgacaagtgtatttgctgtatagatctcaattcatctggctattctaattctaaaccatgcctcagagtggccttcctgtgtgtctgctgtggccttcaaatgactggtccagggagactaggaggccggggctagagcctagctaccacaaagttgagtaaagaggccatggagaaggctgggcggggtggctaatgcctgtaatcccagcactttgggaggctgaggcgggcagatcacctgaggttgggagttcgagaccaccttgaccaacatggagaaaccccgtctctactaaaaatacaaaattagccgggcgtggtggcggacgcctgtagtcccagctacttgggagactgaggcaggagaatcacttgaacccggtaggcggaggttgcagtgagtcgagatcgtgccattgcactccagcctgggcaacaagagcaaaactctgtctcaaaaaaaaaagggggggaccatggggagtcctaggaaacaggaggctttctttgagcacctctagcacagtcctagcctggcagagatccattgcatccttttacagatgagaaacctacacacagaataaagcagggacttgctagaggcaaaaataagactggactcccgcacttcctggcactgaatctagggctttttccattatcaacaatggccagaagggagttagcaatggctcctggcctgggggcctatgtattggctccctggtaccattttatgttcacttgaatcactcacctctttatgagggtgtatttactgtcacacaaccatcagtgtgacagatcctttggtgtctttgctagttgttttggtaacatggtaacatgggagagagcctaaaactccccagacagtaaccttctcctgataaacaatccacccaagggcaaaactggccaatggaaacctggaaattgtgagagtcatgtatatttccttcatcccagcatggctggacgtcaacagaatcaaacacagtcttcaacacaacttcagtgcaacacaacacaacacaacacaacacagcttcaacactgtcaacaaaaatgtgttcaaccaacacctggtctgatcacagagtctgaaaactggtgcaatgaaagagcacagtcagaatggagggggttggcatccgtggctacagctccattcatctccttagaaaccagtcctgatccaggaaaatgtctctccattacggttgctgctgccctgagtgcacatctgtggccataaaggaaatgatgtgggtgattcggccaagagttgcctgtgtggtcaaggatgccggcagcgcaggaaagtcaagaccaggcaggtccggggggcagttcgtgctcatgagcacaggccatgtatgcagttgtgggagagctgggctagccgttgacaaggacaatcatttgtggtgttgtttctctgcttattcaggggaaagaatttcagctcctgaaagggaaatctactgtcattattgcaaccaaatgattccagaaaataagtatttccaccatatggtgagtagcacttagtaattttctaatggtgccaatagttcatccacattctgaaaagtgtgataggaaaggcagattctgggcccaattttacatagcatggatattaaagggtcccatatttattttttgctttgttccaaaagatagtttagtgacttgcttaggctaatcaagcacacaaaaattggtcttcatttgtgcccagcccttcaaaggggcttcccttgccactcccaacacccccgatcacctctgaccatctccaaacttcatggcctggacattgcaatttggtcctcagtagggcctgtcttactgttttcggtcccatgtgggagtcttctctattagactgtgagcttcctgcaaaactgcatgactttttccattttcctgacatcagagcttggtgcaaaaagaggactctgtagaggcgcagttacgtgattgactgactgactgattttgcctgggaacactcacaggttcttccctccatagcccctaagcgccgtttagtgcattgctgtgccaagttgctcccttcttttgcacagaatggagcatttcccctttgggaaacttaccaaggcttctctccaaagaactcttctccttctccttgggcagaaagttgtttacctttcttaacacttcagtgcttaaaactacagaatatcaaaactaaagaaaccatagagacgatccagcttttcgctcttttctttttctttttactattgtggtaaaccacgtataatgtaaaatttgccatcactatagagacatttggtacattcacaatgttgtgcaatctggttctagaatattttcatcattccaaaaagaaatcctatacccattagcaggtactgtacattccctcatcttcccagttcctggcaaccactaatctgctttctatctctatggatttgtctattctggacacttcacatcagtagactcatataatatgtggtcttatgtaaccatcttctttcacttaccgtaacattttcaaggtttgcccgtgttgtagttgtggcatgtgtcagcatttcattccttttaatggccttttcttttcttttatttttttgagacagggtctcactctgttgcccaggctggagtgcagtggcgtgatctcggctcactgcaacctctgcctcccgggttcaagcgattctcctgcctcagcctccggagtagctggggctacaggtgcctgccaccacgcccggctaatttttgtatttttttttagtagagacggggttttaccatgttggccaggccagtctcaaactcctgaccgcaggttatccgccttcctcggcctcccaaagttaatggcctttttacggtcatcccacattttgtttctctacttgttggtaaacattcggattgtttccacctttcagctctttgctttttgaagtgcagtctgtggaccagctgcatgagcatcacctggaatcctgttagaaatgcagaatctcaggccctccccctagaaatgctaaatcagaatatgcagggtcacatgatttcccaggcatttcaagtctgagatgcgctgccccagccacgggattctcagccttggctgtacgtggaaatcacctactgacttgttttccttagtactgatgtttattcgatcctataagtggtccatgtgttctgtttgaatgagaaaatacttggtgagcaccaaaacaagagtaaagctgactacttcccttcaaatgtccagcctggcaaccagggcacctacacacttatttgaaggctacagggaagtggggagctccaatacacatggaactggatttgtgctcagaaactctgaattttagttctgctgtgccccttactggctgtgtaacctctctgagcttctttcttcttttgaggaaaatggggataatggtttatctccttgttcaggaaaagaagacatccacaaccagccaacaccagatctatctccttggcagcatccacactcacttactttgccttcccacctcttaaccatagaggagcttcctatgtgcctctctaaagcctatcccctcctactggtataatataccctctctttttgcctacacaaggtcacacaagttttttgctacactgctccagcaattctcccctctctgtcctgcaacagagagaggttaaatgagctgtacacgcaggtaacaacaaagtctcacatctctaggttgtcctaacatttcttacaataactttttaaaggggtaccactattgaatatttatatatcaatggccttgcacgaaaagaatttttttttaattttgaaaattaaggattgaaatcatgtatactaggtggttttgtggttttcagtctttaactttttattaatatgacccaaagccagaaaaacatgaaatacttctgatcccatttcctataagctaccatcttgtttctttgttcccctccgtagaaaaacatttgagctagttgtctataagtaactgcctccatcttttcttctctcattcttattcccactccagtctggctctccattttaaccaaatctgctcttgtcaaaatcaatgacctctgcattgctaaatccaatgctcagttctcagttctcaatttatgggaagcatttactgctcatcactccctcttcctcagtggactttctcggcttccagggtaccacactttcctggttttcaaggacattggtggtctctcattctctacctccccagcctcttaattttggggggccccagggcttagtctctggtctcttctctacctatattcactgccttcattatttcatcctacctcctgatttttaaaaatgccatatgtaaggccgggtatggtggctcatgcctgtaatcccagcactttgggaggccgaggtgggaggatcacaaggtcaggagatcgagaccaacctggctaacacagtgaactctcgtctctactaaaaatacaaaaacttagccgggtgtggtggtgggtgactatagtcccagctactcgggaggctgaggcaggagaatggcgtgaacccaggaggcggagcttgcagtgagccgagatcacgccactacactgcagcctgggcgacagagcgagactccatctcaaaaaatagataaataaataaaaatttaaaaattttttaaaaagccatatgtagtcagacacttccaaatttatatctcagtctgggtttttctccccaaactctagatttgtatattactatttactgcatcttcacttgaatgcttgatagacatcttaaatgtaacacatctgaaatggaatcctctctgccacagcttggcccatctcagttgatggcaactctatctttccagttgttcaggccaaaatctcaggttcactctcgacttctctttccctccgcattgctaccctggtatgaaccatcatcttctctagcccagatgctgcagcagtctcctaaacggtcttcctacttctcaccttgccccctacagtctattctcatcacagaggtcaacgtgatcccttaaaaatacaagtcagattgtttggctcctctgttcagatctctgtactgattcttgccccattttatgcaaactcaaaactacagtggctttagagatctatgtcatctttgcctcccttcttatctcatcacctctttgatctcatgtactactcctgttcagctcactggcctcctgattgtttcttgagcataccatgccttagggccttttcactggctactgcctctggctggaagctacctcctcaccttccccaccctactccaggagctaactctctcacttctctcaagtctttgcccagatggcaccttctcaaggagatgtaccacaacaacctatttaaaattgcaactccctctccatcacatatttaccaaccccttaccttcttctattattttttccatagcatttgccaacttctaacatattatctaatttacttacttattatggcccttgttaattgtctcccacgacctcagaaaaactataagccccactggtccccttcatgctaactactccccagacacaaatactctacttttgcttttagctgtttcttctggtaatcaccttcatatgtctaaagcaccttcttatattttttccagttttagatattacttattgactcataaggatttaggaatatagatttcacttttttataccacccatcccacacacacacctccaaagttcttcatttcatccttccaatgtattgatttcactcattctggttaaataaatattcagtattacattagtataaccatgtaaacattataaatggttttccacatgaattgtgattatgtgttctttctcctacaactttttgttttacctggacttaataattgcttcggtttttcatttgcttcactttctaggtacctatcactaaatcatccctaaaattctctaccagatctgaaaattcccctgagtacaactacacacatcagatagtctgtccatttcattttgggagcatgttatgccccaggcttgatgattagctgttggtctggaatttcttccactctctccacggttggagttctgattcccaaatctcaggtctcatctttctctttcttaggttactccttgtttgatagaacatatccccaaatagtttcttgagaaagaaagcatgagaggcaaattttttaggccttatatgtctgaaaatgaaagcttgggtggctatagaatctattgaccatcttaatctgtttattaaaaatcttattacaattctgatttggccactacacactgtatacatgtattagaaaatcattctgtattctataagtatgtatcattattacttgtccactaaaaataaaagaaataaaattgattacaaaaactttcaaataaatatgacagtagaaagttaatacaataaacattcatgtatttactccccagatacaacagttgttgttctaaacaaggtgaataaaaataaatctactcttagatacattacaggtaaaaggcaaaggttgatttctttgaaatcagccgaagaagattacaagcaaaggaatggcagttaggctgaaagcaaatatatcgacagcaataatagaagtgggtatgcagtggaataatcttcaaagtgctaagagaaaatagctgttaacacgtggaaatcaaaagttttccaggcttgaactatactttgtttgttttcttttttctaaagtatgttaaagcaaatccaagatatcctgttatttcaccatcattctttaatatctcaaaaatacagtcattttcttaatcacaatgcctttatcactctcaatgatgttaacaataattttcccccatcgttttggggccttgcatttaccactcttgttcattactactgctgctgctgctgctgctgctgctgcttgcttctcccttgtattctattggattgagcaagatttctttattctctttcttctttcctactgattcgtcaattttacatttatttctatcatttcaatagttacccttaacattttaatataaatacttgacttaataaagtctaaagttagtcattatctctactttccttacaaatagtatatagatttgagaacatgttaacactgtaactatcttacatgaaaatgctgccagaattttgtttcattttgctttcatactacccctctttactgattattgttgttatttatgtaactcatgcctgtttagatatactcacatgtttttgtttttgctttttttctttctttctttctttttttttttgagacaaaagtctcactctgttgcctgggcttgagtgcagtggcacgatcttggctcactgcagccttcgcctcctgggttcaagcagttctcctgcctcagcctctcaagtagctggtactacaggtgtgtgccaccacgtctggctaatttttgtatttttagtagagatgggcttttccatgttggccaagctggtcttgaactcctgacctcacataatctgcccacctcggcctcccaaagtgctaggattacaggcatgagctactgtgcccggctggatatactcacaagtttacccttctctttactcacattcttccttggatcctaagctttccttctgggtatgatttctctcttcctgaaatacatctcagtagcttcttcaccaagaaccttgagtagtaaatctttagttgcctgaaaataagctttttgttttttgcatccatgaatgatagtttagctggatatcaaaatctagattaacagctattttctcttatcattttgaagattattccactgccatcccacttctgttattgctgttgatgtattttcttccagcctaattgccattcctttgtacgtaatctttatatttggttgatttcaagatcctctttgccttttacctgtaacgtgtttaagagtagttttatttttattcattctgttcagaacaatgtactcaaatgtgtttgcttttctcctgctcaggatttctctttccttaatataaagatttatgtcactaatcaggcctgaaaattctcatctattatctctttgaattcccaacattccccaactctcccacattctctcaactctccttctggaacataacacatgtatattaagcattctcattctagcttcatgactctcttttttttcatgactctccttttttttcatttctctcttttaatcgccttatgtctcttaacctttcatattttctctatttctatctcttatattctgggtaatttcctgaaattatctccaagttcattcattctttcttggccaaatctaattttctgtttttagcccatccatttaggttcaatacctgcatttttcatgtctagaagttcaatttatctttctttcaaatttgcctatttttgttctcactacaaaaaaaagataggtatgtgaagtgattgatatgttaattaacttgatttaatcatcccacaatgtatatatatattaaaatatcacattgtaccccataaatatataaagttattatttgttaattacaaattagaaaatttcaaatttacctgttctgtttttcatgagatgttattcttttcccagatttaatcatttttaattaatttattttacagtctctatcctatagttgcattacctgaacttcttggaggctaatctgactacttttgtgtctgtgactcttactcaaggtggattgcttccttgtgtgtttgtaattttggattgtgagtttctatctggtgggactctacctatgaggatcctctatgacctattttgaggctgttgtccctccagaggaattttgtgattgcttctgccagacatctcaatgtttatgttaattcttctgctcagggattcccagaccatgaggccaaagtaaatcctaatcccacacacaggaatggcatggacctgtgattttgagttttcaggggcataagttttcatctccacactcaaataccgacccaagaaagaaaagcttccttgccactttccttttctcattagctgatacttttcctcttacccaccataatttatcctttaaagtttccagctttatgcaggatcaatagagtcttacttccaaatccccacctgtgtggatgggactttcctgtcatccaagcccctagttacaaagttgaccctacatctcccataagcagtgtcaactcctgtgcttaaccagtccatttgtgctgctataacaggatgccacagacagagtaataataaagaacacaaatttatttcgaacagttctgaagactgggaagttcaagatcaaggcaccaccatttggtgtctggtgagggccttcttgctgcctcctagcatggtagaaagcaaaagagtagaaggctgtagccaaatacttcatgaatcctcttttataaggaccctaatctcattaaaaagggaggacctttcatgatctaatcacccccgaaggccccacctcttaataccatcacattggcagcacctgaattttggaggagacacattcaaaccatagcaaccagtcagaccttcattcctggaatgcaaaattttctttctttcctgcaaagccagctattaaattgaatgtctgtcacattttatacaccatataaaagtgtttacagtgggaatttcttgtgttatctagtctactgtattttctgaccattaaagctgaagtcattttaaaatttgatatattattcacaattgcagggtaaatgttgtccagactcagagtttaagaaacactttcctgttggaaatccagaaattcttccttcatctcttccaagtcaagctgctgaaaatcaaacttccacgatggagaaagatgttcgtccaaagacaagaagtataaacagatttcctcttcattctgaaagttcatcaaagaaagcaccaagaagcaaaaacaaaaccttggatccacttttgatgtcagagcccaagcccaggaccagctcccctagaggagataaagcagcctatgacattctgaggagatgttctcagtgtggcatcctgcttcccctgccgatcctaaatcaacatcaggtactcagcctctgttctctgcttacctttctgggaaccatccgcacagtgtcttaaaaaaatccaagacctgaaagatgttcacaaatgttgtggctgaaaaggccgttttctctgactcccacttctctgggtgcccaaatgcactatctcgtagcacttaccacctggtttatttgcatcacctccgagagactgagtcacctttgactcaagccaggtctttgaaggtagagccaggtccctcttctctgtgtctccagcttctaggccagggattgatttggagcaactgcttcaaaactgttgagtaaatgaatgaatcagaggatacccagtctatctctctcatggtgtagatatggcactgaggcccagagatgagatgtcttggtcaagatcctaagccagttggtggtggcttacctccagcagatcaaggtttgcttcaagaagatcagggtttgtaggcatctccctgaatatcatgatttttatgtcctaggttattttctagtaataataataactggcattagaggttgttaaccattgtgtgccagttacaatacagagctctttataatcttcatcataaacaataggcatgcattttatctccattttacagataaggtgaagtagctttccaaggagtatacaattagaaggtggcaggatccagcctgagtccacatgtatatagctccaaagtttatgctcttaagctccagattaaatgccttacttaaaaaatttattttttttcaaaatacataagtactagattttgttggagctagttgatataatatcatataaagaagtataaaagcaaagctaaccctaattccccaaccccataccctgagataccactttggacagtcttatgggcatcttttcaaagctctacctttgcatatacaagcctaaacaagcatatactgggttttacttgtttctttttccacacatattatcttactatactttttactctgccacatgcctttttcacttagtatatgatgcatgcttcttacaaaagacttagtatgccaaaacctttttttctaacttccttgtgcatctatgtatgcacataagcatataattttacaaaaatgggttcatttcatatttgctgggggtgttactagtgccatttttccttgcctcccacaatttggtatatttcctttcacagttttctccatccttatataacagagtcgccagatttagcaaataaaaatacaggacattcagtcaaatttgaatttcagagaaacaaagaattgtttttagtgtaggtatattccatgcaatgattgttttgctaaaattaaaatttaaccaggacaccctgtattttatttagcaatttcttatataaccaccatacaaacatacacatttggagtcctgttatatacattttttcacttttttttttttgaaccagtaaagctgccatctttttttttttttttttttttttgagacagagtctcgctctgtcacccaggctggaatgcagtggtgggatctcggctcactgcgatctctgcctcccgggttcaagcgattctcctgcctcagcctcctgagtagctgggagtacaggcacccgccaccacacccagctaatttttgcattttagtacagatggggtttcaccatgttgtccatgctggtcttgaaatcctgacctcaggtgatccacccgcttcagactcccaaagtgctggaattatagggcatgagccaccacgcccagcaacatttctttacatcctaatgtaaattcagcaatacccaaggaaatccctacaaacaaaacagtgtggcttatttttattaatggctgcctaagattccatggtgtgagtgttctcccatctgtccctccacccagtgatagcaacaggcccctgttaaactttgtcgcaagcctcctatacttctggctcagtgggctcctgaccttttctatgccattacactccagtctttgggcagggctcatgctctgtaacaagggacagcaatatccagagatattctaggagctagcacttcttactttaaccatatcaaactttttttatatccatttcttaggagaaatgccggtggttagcttcatcaaaaggaaaacaagtgagaaatttcagctagatttggaaaaggaaaggtactacaaattcaaaagatttcacttttaacactggcattcctgcctacttgctgtggtggtcttgtgaaaggtgatgggttttattcgttgggctttaaaagaaaaggtttggcagaactaaaaacaaaactcacgtatcatctcaatagatacagaaaaggcttttgataaaattcaacttgacttcatgttaaaaaccctcaacaaaccaggcgtcgaaggaacatacctcaaaataataagagccatctatgacaaaaccacagccaacatcatactgaatgagcaaaagctggagcattactcttgagaagtagaacaaggcacttcagtcctattcaacatagtactggaagtcctcgccacagcaatcaggcaagagaaagaaataaaaggcaaccaaaaagaaaggaagtcgaagtatctctgtttgcagacgatatgattctatatctagaaaaccccatgatcttggcccaaaagctcctagatctgataaacaacttcagctaactttcaggagacaaaatcaatatacaaaatatggtagcatttttatacaccaacgacatccaagctgagagccaaatcaagaatgcaatcctattcacaattgccacaaaaagaataaaatacctaggaatacagctaaccagggagatgaaagatctctacaacaaaaattacaaaacactgctgaaagaaatcagagatgacacaaatggaaaaacattccatacttatggataggaagaatcaatattgttaaaatggccatactacccaaagcaatttatagattcaatgctattcctatcaaactaccaataacattcttcacagaatcagaaaaaaaaagcattaaaatttatttgaaaccaaaaaagagcccaaaaagccaaagcaatcctaagcaaaaagaacaaagctggaggcatcgcattacccaacttcaaactatactacagggctacagtaaccaaaactgcatgatactggtacaaaagcatggtgctggtacaaaagcagacacatagatcaatggaacagaatagagggcccagaaataaagctacacacctacaaccatctaatctttgacaaagttgacaaaaatacgcaatggggaaagaattccccattcagtaagtggtactgggataactagctagccatatgcagaggattgaaactgaaccacttccttacaccatatgcaaaaatcaactcaagatggattaaagacttaaatgtaaaaccccaaactataaaaactctggaagataacctaggcaataccattctggacataggaacggaaaaagatttcatgacaaagatcccaaaaataattgtaacgaaagcaaaaattgacaaatgggacatgattaaacagaattaccatttgactcagcaatcccattattggttatatacccaaaggaatctaaatcattctgtcataaagacatatatacacaaatgttcacggcagcactatacacaatcgcaaagtcagggaatcaaactaaatgtccatcagtggtagaaaggataaagaaaatgtggtggcagggagtggtggctcatgtctgtaatcccagcactttgggaggctgaggcgggtggttcacctgaggtcaggagtttgagaccagcctggccaacatggagaaactccgtctccgctaaaaatacgaaaattagccaggcgtggtggcgagcacctgtcatcccagctacttgggaggcctaggcgtgagaatcgcttgaacctggaaggtggtggttgcagtgagccgagatcctgccactgcactccagcctgggcaaccaagcgagactctgccttaaaaaaaaaaaaaagaaaatgtggcacatatacaccatggaatactatgcagccataaaaaagaatgggatcatgtcctgtgcagcaacgtggatggagctggaagccattatcctaaatgaactcactcagaaacagaaaaccaaataccacatgttctcacttataagtagaagctaaacattgagtacacatggatacaaagaagggaaccgcagacactggggcctacctgaggtcggagcatggaaggagggtgaggatcaaaaaactacctatctggtactatgctttttatctggatgatgaaataatctgtacaacaaaccctggtgacatgcaatttacctatatagcaagcctacacatgtgcccctgaacctaaaaaaaaagttaaaagaaaaacgtttggattattttccctctttcgaacaaagacattggtttgcccaaggactacaaataaaccaacgggaaaaaagaaaggttccagttttgtctgaaaattctgattaagcctctgggccctacagcctggagaacctggagaatcctacacccacagaacccggctttgtccccaaagaataaaaacacctctctaaaagctgctcttccacctttctttgggttccgcactggttttccagggccaggaatggcagcagccaggaccccaggataagggcagtgcccaaggaaaggggagcagaagacattcagggagggggaaagaaatgaggctgggacagtggataagggccaggtgaaggggagaggggcggcttctgaaggctttgggcagggagagtggctgggggaagcctagtaatgcaacctatccagcggcggcttcggaaaaaacccggggctgggtcaggatgggaaaggcagcgaactgaaccgttttgagccccaagttcggggccgaatgtcttccctgtgcgcagaagcaagggcgggggcgtgccatcctcacccggagcgccggccgagcctcccgcctcccaacgcctggccagggccccgtctcgccctctgcacatgggatccactgaccaggcaactgcaggtttggggctctgcgacccgggggcaggaacagagccttgcaggcggcagcgcgtcacaaaggcggccggagcttggcatttagcttgggccagagcaaggcgcagacccggggcgcccatggagttggcgtcggagcaacagctgcgcgggcggagcaggtaggcgcgctccagtccctgcagcccgagcggggttcagcgaacgggtaacgggagaatgcgggccggagcaggctggggtggcggtgggatgccccgaggcccgcggcggggaggcgggctgctctcatcaccccctctgggaagcatctttggctgcaggagttgccaggccaactccccctcccgcggtgggtaggacatctttagatttccctccctggttggcagctgtgtgatatggtggaccaaccctgggttcgaatcctatctccccacttactacacgttctccctgggaaactttattcaccttccaacacctccgtttccgtatttgtgaaatggatgtgtttgtattcctatcttccttggcgggacgttgcagaagtacctcggcaccaactttcttattaatggcagccagctcttgtatagcgtttactacgtggcaggcactcactgttcccggtgctttccaggtatcagctcacttaatcctcccaacactaagagaaaggcactattattaccccatatacagatgtgaggattcacacataaagaaattgacttgcctaaggtcatccgactgtaatgggcatagctaggatgcagcccactaagctacactgcctctgatggggtctcggggggtaaggggaggctcccagtcattaaatagaatttggagtctccttacagcaactcttccagacacacatattcttccaaccccacccttacagcaccagtgtctgatgacttttcctgacctacaaccttgctaggccaaaaggtttcatggagcttttatttacttatttattttattatactttaagttctgggatacatgtgcagaacatgcaggtttgttacataggtatacatgtgccatggtggtttgctgcacccatcaacctgtcatctagaatttaagccccgcatgcattaggtatttgtcctaatgctctccctccccttgcccgccaccccccgacaggccccattgtgtgatgttcctctccctgtgtccatgtgttctcattgttcaactcccacttatgagtgagaacatgcagtgtttgatttcctgttcctgcgttagtttgctgagaatgatggtttccagcttcatccatgtccctgcaaaggacatgaactcattcttttttatggctgcatagtatttcatggtgtatatgtgccacattttcttaatcctgtcgatcattgatgggcatttgggttgattccaagtctttgcttcgtggagcttttaaactggtttatctcttctgcagcaccttttaggagctttgcttggtggtgagtgctgtggagatccctagccttgggcagtttgcaagtgattgaagagacctatttcttcatttgttaaatgtttaagtaccttctcaaaagcagaaggaggttgtcaaggggtgtgtgggtcccttgggagagaaaggcaaggacacagattatacaaagaggggcactggcaagaggtagcagaaggaggcaagctaaatacggacacagccatgctgggaaccactagggcgccacgtcatgggcgggacgggctgctgttcagtcctttacggaagtctgttcggatgtggcggtgggaaggccagctggagacaggggccaaatcagtgagtgggtggtgagagaaagtgatggcgtagtgaggacaaagcctggagaaggtccctagggaggcccacaactgtgcttacttgaggatgctcactgccactgtggtgttggtgggagctggaggagacttggggtccatcaaaggaaagaggatgggagacaggcaggatacctgccatgggttctattcagctgctagacgcaatgggtgaaatgtacacagagccacaggaataagtccgacaaacagtaagtacacatttggcaagcacacatacagacaaaaagacacacgtcaaacacacttgaacagttgcctatggtgggggcaacggaatgggacagagggttaaaatggaacacatgaataaataaaactagagaggggtcttgcacagacgaataatgtcagtcctgaattgggaaatgtgattcacttgcccctgcacccttgtggtccaagaggtggggacaggaaaaaaaagtacagaagaaagagtcaaaaagcccaagttccagtctggggcccgatactaacttgctgtgagactataggtgagtcccttcacctctctggccttcagtgttcatctgaaaagaaatcaattctcaggtctctttccagcaccacaattttatgagccatgatcaataatcttgggtttatctggtaaagtagtcagtgagagctttaaggagtggtagggcttgaactttgaacaatgggggtttgggaggggcaaacaacatgaggagagtttttaggcaaatgaaactttgaaagcaaaaaactgtaaaaagtttagcagatggctataaaatatctatggatgaagcaggccttcgctcagatctctgccgggactctctagttgggtcagaaaatttccagccttccccacctcttccttcaacagttaccaaatcgtgtcttctaaagaacttgcaaacacatccccattcccaccacaatgcctggactctgctcttgaccatccttcctctgtcccccaggagtgtcctttccacacctcaaaactcaccacatggcttccagacatttgaccaatcaaccttcatggctctctgtgacctcagctggggttttccaccctgttctgctgttacacctcttgaattttacacaactgtcagcaatgtagctagatacaggaaggggacaggccatgtcagaattccagaatcttggggaaaggggaagtgggactctctggcctctaggacataatctttatcacatcacgcaggaccccttgatccagcacttcccactgctcccacgtgatccagttcctccatttccagcccacttaacaagttaagtgccaggtgaccaaaccatttttagctccctgaatgggaacacatcacatacattcacagttctgtggctttgcacgtattgttccctctgcccagaatgcatcagctcctcatccactaccactaggcccacctgatctgccttgcaaatcctactcacccttcaaaacccaactcagacgtcgcttcctctgagcagccctctctacttccaaacactatatttagtcaaacagagtaagtcaccctgcatgtgtgctaccccacactatgagtctgcctgaaccttcctgctctctcacagggttataattgagtactggtctgtatccctggatagactgtgaaatccttgcaggtgtggactgtgtcatgaatgtatcattgaaccacccacacctggcacagtgcctaatgcacttgggaccacagggaaagctggttcatttgagtttaatctctgtttgacaggtaatggctcttcctttttattccccacagaaagcaagtgattgctttcctttcctcatttttggaagccctgcctaacacacagctgcactgtacatcccagttcctggatggacgaagaaagtgaactgatccagccccaagaccagagctgctgggcctttctgcccgatttgtgtctgtgccgtgttttctggtggctaggagacagggacaggtccagggctgctcttgtctgcagaaagtggaaccagatgatgtattctgctgagctctggcggtacagaaccatcaccttcagcgggagaccttccagggtacatgcatctgaagttgagtcagctgtttggtatgttaagaagtttggtcgttatctggagcacctggaggtcaaattcatgaatccttacaatgctgtcttgaccaagaagttccaggtcaccatgcggggcctcctgtcttgtctgagtaagagcaacaaccgtctgaaatctctttccatccaatacctggagctggaccgcctggtatggaggaacagcatcaggagctcattcatcagcagcttgagcttcttcttaaagaagatgggcaaacgcctggattatctcaacctaaaaggggccaggctgaccgtggagcaaggctgccaaattctcgactccctcagctacatgaggaatgagaatgtgatctcagagctcaacatcgaggactatttcagccatcaccttgctgtctacaacagcccccagttcaaaaagaccatgtccacattccacaatcttgtgtccctgaacctcaactacaactgtatctccgacgagctgcttgagaacttgtgtgagaatgccagcaccctccggaccatcaacatcaaatgccacgttcatgacccccacggacaggtcatctggggtatgtcctgggccaagctggccaggcaggccaccaatctgaaggtgaacttcttctttgaacggatcatgaagtacgaacgcttggcccgaatcctcttgcaggagatcccgatcaggagcatcagtctgagaagctgctatttcagtgacccagactgttcaatgagacccactctgatagatctcctgcccaccttccggcacactctgcaggtaggtaggacttgtgaggagtgactgctgttcaggtgactggcttccccagaagaaagcccactgctgcctgctcttggctaggctcccaaatgttcactcaatctcaaattgaagttctaggaaataccaccaactaagcctcctgccctcctcccaagaccacagtaggcaacagaagctgctactcacttcctacatgtggtacagacacaaggaattatctggttagctgtcagctagggaaaacccctaagtccccactcagagctatgaagcctgagccaggaggtgccttgcaggcgaatagcggctgggctgcctcttcctacttttccacgaggtcacagcagcatgcaggagaccctgtggctcctatggtcagatctcagtgggggatctgtctggttatagcagtgccagtgcctggtaattggggagatagaatggggaggaccaggccagacaaaaagtcaaatttgatttacacaaccgaagagctcagagtttctgggttgttccctaatctagtagctttctcacctgtaagatcaggatcattttgtctttccaaggacctcacagtggttgtgacaactgatattaacaggtttatgtatctctacaaacatggatggactccaaggtgctaatacctcattaggtacccacataaaccaaaggtggggtacggcagacatcatcatgacccttgtgtgctgcagaagaacttgaggttcaatgaccagcccacagtcacccagccagtccactgcagggctgggacgagcaccttgtatactccaagtacactgcctccaaattccaagttttgcaaccttggatgagatcaccatcattctcaaatctcttcctctaagaactacatgtccaatgtcccttatctaaaaagcccccaaattccattaacaccagacctgtcctacaagaaatgctaaagggagttcttcaatctgaaagaaaaaggcattaatgagcaataagaaatcatctgaaggtacaagacgtatacttactattacttactggtaatagtaagtacatagaaaaacacagaatattgtaacactggaattgtgtgagtaaactactcatatcttacgtagaaagacaaacatataagctgatcgaaaataataacaacaacaacttttcaagacatagacagtacagtaagatacaaacagaaataacaaaaagttaaacagtagggagacaaagttaaggtaaaaagtttttattagttttagttttgctgtttattagtttgtttatgcaatagtgttaagttgtcatcaatttaaaataatgagttacaagatattgtttgcaagcttcatgataacctcaaatctaaaaacatacaacagataaaataaaaagcaagacatgaaacatacctccagagaaaatcaccttccctaaaaggaacacaggaaggaagaaaagaaggaagagaagaccgcaaaaaaccagaaaacaaataacgaaatgtcccgagtaagtccctacttagtaataacattgaatacaaatggactaaaccctccaatcaaaagacataggtggctgaacagattaaaaagaaagactcaattatctgctgcctacaagtaacacatttcacctataaagacacacatagactgaaaataaagagatgggaaatgatatttaatgccgatggaaaccaaaaaagaggaggagtagctatacttatatcagacaaaatagatttcaagacaaaatctataaaaagagacagagtcattatataataataaaagagtcaattcagcaagaggatataacaattgtaagtatatatgcagtcaacaccagagcacccagacatataaagcaaatattattagagctaaagagagagatagacccctatataataacagctagagacttcaacaccctcctttctgtattgggtagatcttcaagacacaaaatcaacaaagaaacagcagacttaatttgcattatagaccaaaagggcctaaaggatatttacagaaaatttcatccaatggctgaagaacacacactcttctctttagcacatggatcattcacaagaataggccatatgttaggtcacaaaaaagtcttaaaacagtcaaaaaattgaaattatagcaagcatcttctctgaccacaacagaataaaactagaaattaataacgagaaactttggaaattatatgaagacatggaaattaaacaatatgctcctgaatgaccagttggtcatgaagagattaagaaggaaattgaaatatttttgaaacaaacaatatgcagacacagctaccaaaacctgtgggatacagtgagcaatactaagagggaagtttatagctataagcgcctacatcaaaaaagaagaaaaacttcaaataaacattctaatgacacactttaaaggactgaaaaaaccaagagcaaaccaatcccataattggtagaagagaagaaataataaagattggagcagaaatgagtgaaagtgaaacaaataatgcaaaagatcagtgaaataaaagctttttgaaaaataaacaaaattaacaaaccattagcaaaaataagaaaaaatgagagaagacccaaataaataaaatcaagagatgaaaaaggagacattacaaccaataccagagaaatacaaaggataattagagcctataacgagcaactatatgccaataaattggaaaacccagaagacatggataaattcctacacacgtacaaactaccaagattgaaccatgaagaaatccagaacctgaacagaccattgacaagtaacaagatagaagctgtaataaaaagtccccaagcaaagaaaagcccttgacctgatggctgtactgctgaattttatcaattttatcaaacatttacagaagaactaataccaatcctactcaaaccattccagaaaaatagaagcagagggaataattctaaactcattctacaaggctgatattaccctgataccaaagccagataaagacacatcaaaaacaagaaaactataggtgaatattcctaataaacattgatggaaaattcctcaacaaattattggcaaaccaaattcgacaacacattacaaagatcattcatcctgaccaagtgggatttatcccagggatgcaagaatggttcaaaatatgcaaataaatcagtgtgacacctcataacaacagaatgaagaacaaaaagcatatgattattttaattaatgctgtaaaagcatttgataaaattcaacattccttcatgattaaaactctcaaaaaactgggtatagaaggagcatacctcaatacaataaaagccatatatgacagacccacaactagtatcatattgaatggagaaaaactgaaagccttttctttaagatccagaacagagcaaggatgccactgttaccactgccattcaacatagtactggaagtcctagctagagcaatcagatgagagaaataaagggcacccaaatagaaaatgaagtcaaataattcttgtttgaagatgatatgatcttatatttggaaaaacctaaagactccaccaaaaacaaaaacaaaaaaaactatcagctaaacaaattcagtaaagttgcaggatacaaaatcaacatataaaaatcagtagcatttctatatgccaacagtgaacaatctgaaaaagaaatcaagaaagtaatcctgtttataatagctacaaataaaattaaatacctaggaattaaccgaaggaatgaaagatctctacaatgaaaattataaaatattgatgcaagaaattgaaaaggacacaaaaaaatggaaagatattctatgttcatgagttggaagaatcaatgttgtcaaaatgtttatactatcgaaagccatctacagattcagtgcaatcctatccaaataccaatgacattcttcacagaaatagaacaaagaatcttaaatttatatatatatatgtgtgtgtgtgtgtgtgtgtgtgtatatatatatatggaaccacaaaagatgcagaatagctaaagctgtcctgaccaaaaagaacaaaactgtagaaaccacattacctgacttcaaattatattacagagctatagtcactaaaacagcatgagactgacataaaaacagattttaagccccttatatattctggttatttattaatcccataaagaccaatggaacagaatagagaacccagaaacaaattcattcatctgtagtgaactcatgtttgacaaagatgccaaaaccatacattgggaaaaggacgatctcctcttcagtaaatggtgctaggaaaactggatagccatatgcagaagaatgaaactagaccactatctcttgccatatatgaaaatcaaatcaaaatggactaaagacttcaatctaagacctcaaactatgaaactgctacaagaaaacattggggaaactctccagggcattgaactgggcaaagacttcttgagcaatacccacaagcacaggcaatctaagcaaacatagacaaatgggatcacatcaagttaaaaagtttctgtacaatgaaggaaacaatcaacaaagtgaagagacaacccacaggaagaatgggagaaaatatctgtaagctacccatatcacaagggattaataaataaacagaatatacagagctcaaacaactctataggaaaaaaaaatagtaatccaattaaaaaataggcaaaagacttgaacagatatttctcaaaagaagacatataaatggcaaaataagtatattaaaaggtgctcaacatcactgatcatcagagaaatgcaaatcaaaaccacaatgagatattatctcaccccagttaaaacgatttttattcaaaagacaggcaatagcaaatgctggaaaggatgtagagaaaaggaaattctcatacacagttggtgggaatttaaagtagtacagccactgtagagaacagtttggaggttcctcaaaaaactaaaaatagagcttacatatgatccagcaatcccactgctaggtgtataccccaaagaaagaaagtcaatatatcaaagagatgtctgcactctcatgtttattgcagcactgttcacaatagccaatatttggaagcaacctaagtgtccatcaatggataaagaaaatgtggtacatgtacacaatggagtactattcagtcacaaaaaagaatgagattctgttgtttgcaataacatagatgcaactgaggttgttatgttaagtgaaatatgctaggcaccgaaggacaaactttgcatgttctcacttatttgtgggagctaaaaattaaaacaattcaactcatggagatagagagtagaaggacgcttaccagaggctgggaagggtagtagggggtgcagagggaagtggggatggctaatgggtacaaaaaaagttagaaagaatgaacaagatctagtatttgatagcacgacagggtgtctatagtcaatcatcatttaattgtacattttttaaaaactaaaagagtataattggattgtttgtaacacaaaggataaatgcttgaagtcatggatactctatttaccccattgtgattattacacattgtatgcctacatcaaaatatcccatataccccataaatatatgtacctatgtaccacaaaaattaaaaattaaagttaaaaacccccaaatcatcatggctatcaggcccagagccaggtcgtggaaatgttacagaacaactcagccaggctcagcatctctgcccacacacatcttcccttttggtgctcttccagaaattaacttgtgaattcaacaacaaccatgagtcactcgacgaggagctgcacctcctcatcatatcctgcaggaagttgttttacttcaaaatctgggctttccttgatgttagttttgtggagcggatcctgaagagtcagaaagaacggcagtgtgccctgcgtgtattcaaggtaagaggtccccaggctggttccacggcgtagagtgggggcatccaggaatggtgcttctgctctggaacgaagggctgaataaggcagtgggggacaatcatctgttcattgaaaatcagcagtttcaaagaagggaatctggagctctcttttctagtagttgggtttggtctttttctgattctgccaacatattttcctgattcaacaactgtatgtgtagatcatttaagttgctgtcaagccctgaaaagtgtagtcaccgtgtgtgtgtgtgtatgtgtgtgtgtgtgtgcgtgtgtgcgtgctcatatgtggatgtatttctctgttggcacaggcgagaatttatacaaacagatatgagacgaatgaagaggacaagaccctgcaggaaatttacaggaagtacagaaagctgatcgaatcagagcttagctattttgtcatcgtttactctgtgatgtaatgagcactctacagatgaagaaagctgggagcactttgaacttgaaaatcatttctcttagaactacacttgggcactgccggcccttttgctcctctctctcccctccactttttttttttgtcagctccatgacaacatgaccagctcagcaaaggctgagactgcccatgacctgaaggctccaggtggctttaaagcgctatgtttaccaactatcccggtgtcatttctctttttgtcagttttgctttttgacaccctcactcgtccacagagctaaaaacccaaagccactcagagtagcttcctttttttttttttgagatgtgttgacgaaaagagtcaaactctgtaaaatatttttagagatttattctgagccaaatatgagtgaccatggcctgtgatacagccctcaggaggtcctgagaacatgtgcccaaggtgattggggtacagcttgcttttatatattttaggaggcaagagacatcaatcaaatagatttaagaaatatattggtttgattcagaaaggcggggcaacaaagcaggggcttccagggtataggtaaatttaaacattttctggttgacaattggttgagtttatctgaagacctgggatcaacagaaaagaaatgtttgggatgagataaaggattgtggagaccaagttttactgcgcaaaggaagctctcagatagcagacttcagagagagcaggttgtaaaatgtttcttattggaattagaacggtccctggctcttagttgattatctcctggaaccagaaaggaaggaaggaaaacaaaggggagaggagattctctacagaatatggatttttcccacaagagactttgcagggcaatttcaaagtatggcaagaaaatatattttgggataaaacattttgattttcttccttgttatgccagagtcagattggaaagtcactatatacagggttaactaaaacccatctaattagaatttatggcttgtagggcatgattcctcagaccccttagataggaatttgggcaagatttaaaaaaaaaaaaaatcagagcttagtcctcagacagagtctcattctgttgcccaggctagagtgcagtggtgcaatctcggctcactgcaacttctgcctctcaggttcaagcaattctcctgcctcagcctccaagtagctgggattacaggcatgcaccaccatgcccagataattttcgtattttttgtggagataaggtttcaccacgttggccaggctggtctccacctcctggcctcaaatgatccacctgccttagcctctcaaagtgctgggattacaggcgtgagccaccgcacccagccccagaatagactcttactagaggaccctgactcttgctaacctgtgcacctgaaagggtgtgtgtaaccattaagcaaatagaatcacattttctactgaccgacattatcagtttagaaatcctttgtatccactgaccttcattggggagtctgctgacattgacattgtcattgtctgggcccaatctcagatgcatagaaatctccagcctgcccttgggtgaagcaggaaaagccccacttttaggaggagtctgctcagagctggaactccctcccacagaaggaactcagcccctgacttaatggcatcgtggactcgaatctccttcctccgtttttcctgtgtctcctttatttttccacaaatatgctgagaccgggtctgtgatgttgaacatagatgtgaatggccaagtttgatggccccaaacctggcttttggagccaggtgtctggatgagtactggcctgccatgaacttgtcttgtgccttggggcaagaatttaacctccttgagtttcagcttctctgtgtgtaaacgaagaaaaaattaattacatgcattgcaacacacacacctggcccgtgttggcttttatcttgtttgatatatgaaggaacaggctctaaggaagttaacttaccccgagtcatacagccagtttgtggcagaactaataccaaagtctccagatttagaacccaagactctttcttcctcccaaacaacaaaatgagaagaacccattccctctcccttcctccacccagcttgtctcgacagttattaaagtgatcactggttgagtgtttacatgctagacataaattcacctagtttcatttaatcctcacacagctctagaaagcagagactactattatccctcttttacagggatcctgaaggattggcaagtctaacctgccctggtcacacatttaggaagttctggaagtgagtgtcaaacccaatctaattccagagctctgctcttaattcctacgtattatccccacagcaagaggatttggggtctgttgtaccgtaattctattaagtgaagagcatggttggaagagaggatcgatgataataataaattcctgagcccatgccatagacattgtattacttctggtcctttgggggttttgtgcatgcagtggcatagagttctgtttttcaatagatataaattaacaaaatctcagaacacttttaacaagtgacatttcagattttgtttgtcttgcctcttgtgtgctgtgcccatatttttgcttagctgaggttttcagaagtgagaagtgttggtgacattgtcagacaaaggatttgcagctgttatagactcaccatccaccacatggcactcacaggtagcatttattcacaaacagacctcaaggactccaaaatactgaagatttcccatggtatccagagatgatgagggaacaagggtctgtgccagcttgagcaacaggcacccgtcagtatggcttgttactgacacattaatctccatggcaacagaaagctatcctttccttaattgtaaccatcccaacaaatttgagaaatgctaactccctccaataaagagtttgtgaacctaactgaaattgtccttttaaatgccatttatgatatatggcaggcaatgggaagtattttataaatcacttgtcttctttaaggattttaaggaatatatgccggggctgacagccacagctcacacaagcctcaaaccaagctacgctgtgctccataatgactttattatgtaattggtatgaaggtaaacacagaaagaaaaagctggctcaggctttttaggtattaatgagacttcagtgtttggggtacaactaggtcaatagcattctgctacttccatttctgggctcaactagatacttttcaaagtctccattcacagctttaaggtttgtgtcttcaagacacacttattttttagggctgtaggccaaattgaaagaagccaacctggcatcttataatggtgactgtaggtttgcatgtagtaaacagggagatgtttcactatttcttctctgtcctatcagcttttctcagcccttgaggcaatgtatgtaccagaagacagcagaggttagtcaatttcttttcaaagtccagccaaagataagcatctttttttttctgcatcaatcatctggtcattttttttattatactttaagttctagggtacatgtgcacaatgtgcaggtttgttacatatgtatacatgtgccatgttggtgtgctgcacccattaactcatcatttaggatggattaaagacttaaatgttagacctaaaaccataaaaaccctagaagaaaacctaggcaataccattcaggacataggcatgggcaaggacttcatgtctaaaacaccaaaagcaatggcaacaaaagccaaaattgacaaatgggatctaattaaactaaagagcttctgcacagcaaaagaaactaccatcagagtgaataggcaacctacagaacgggagaaaatttttgcaatctactcatctgacaaaggactaatatccagaatctacaaagaactcaaacaaatttacaagaaaaaaacaaacaaccccaccaaaaagtgggtgaaggatatgaaaagattagcatctttaagcctctgtcacaccactgcactccagcctgagcaacagagcgagaccccatctctactacaaataaacaataggtaaaacaaaaataagcctctacacttcttgacttcttcctccaatactcttttggaattgcttttggcaaagtgtcattgggggctgcctaattgccaaatctacaggatgcttttcctttcttagctgactttctggagccttcgacctgctgacccagtgccttaaaaagtggcacccgtgacagccatgctgtcctggcttcctccagcccctgggatgtctcgctcaacctgagagtgttggtgcttctcagggctcagcccctccatggcttctaccaccacctgtctgcagatgtctcccagccctcttgctatagccagacctctctccacccacgggctcctcataattagcgagagagcttgcctccttagctctcccaccctcacccttattttattttattattattttttaagacaagagtcttgctctattgcccaggctggagtgcagtggcactatctcagctcactgcaacctctacctcccagcttcaagcgattctcttgcctcagcctcctgagtagctgagatcaaggcacccgccaccatgtccggctaatttttgtatttttagtagagatggggtttcaccatgttagccaggctggtctcgaactgatctcaagtgatccatccacttcagcctcccaaagtgctaggattacaggtgtgagccaccatgcccggccttcaccctcattttagaagccctccttctcctacattccctctcagcattccactcaccctgctactcaaggcagaaacctgggagccaccctagatccctccctgtccctcaccctgtataacaaatcagtctccaagccacttagcccctagacgtttctggactctgtcccttcttcactatttctatattcatgtcttaactcagtctctcttatgtctacctggattgctgggcctcctacattgccttcaggcctccaggtccaatctctgcccagcctccagccctcagccccatctacacttgcctaaaagcaccctgctctttcaagcatcggtttcttccttcccatcttcctggaatgtccttcctacctttttcctcagctactgaatttctgctcatgttccatagcaggtgctcaccaattggtaatggctgtttcagacaggctcattgtcatccttcctgtctcagtttaggcggctcctcttccaggaagttgttcctgatccccaaggctgttctcacagctatcatggttattgtcgcttcacctccctccccactacacctgctacatgataggtgctcaataaatgtgggatatattattttgaaatttgtacttttctgtggtcccagctactcaggaggctgaggaaggaggatcacctgagcctggggaggtcgagcctgcagtgagtcctgatcatgcttctgaactccagattgggtgacagagcaagattctgtcaaaagagaaagaaaaagaaagaaagaaaggaaagagaaagaaagaaagaaagaaagaaagagagagagagagagagagaaagaaagaaagaaagaaagaaagaaagaaagaaagaaagaaaaagaagaaggaaggaagggagggagggaaagaaagaagaaaaagaaagaaagagagagagaaagaaagaaagaaagaagaaaggaaggaaagaaaaagaaagaaagaaagaaaggaaagaaagagaaagaaaaagaaagaaagagggagaaaggtaatttgtactttttatttttatttttttctttttttgagacagtttcactctgctagaacgcagtggcgtgatctcagctcactgcaacctctgcctcctgggttcaagtgattctcttgcttcagcctagcgagtagctgggattacaggagccaccaccacgcctggctaatttttgtaattttagcagaaacggggtttcaccatgttgtccaggctggtctcaaactcctgacatcaggtggtccacccacctcagcctcccaaagtgctgagattgcaggcatgagccaccgtgcctggacaaatttggactttttaaagccctggtactacttttcaatatttactcttagttcaaagagttagttctcaaaatattggaaactaactcatttaagaagaaactgggtaccatttaatgggaacccactacatcaggcactgtacataccataactcattttatcttcacaacatcctggcaagaagaatgttcttcatctgatttacagaccaagaaaaggaagatcagataaataacttccctgaagcctcacagccactttgtgcagagcaggaatttgaatctcaccctctcctttcactgccccacactctctgctgttgcagaggtggtatcctggcaagacgctgactcagcctttctaggaaatggtgatttggaacttgacaatgatctttcaaaaacttcagtcttaaattaggcagttacctgctgatctgatacgtagaaacccctgcctagaaaggtgcccttgggatgtatctacacttgctaagaggaagaaatttccctgacatgcattggtcaattggaaaccccaagaatctcactagcctcctctatcccagggcctgggatggcaaagtgctacaccagaaaagggctatgtggatcacaaggacagtgtaggcctcatgactctgagataacagaacagaggcacagagaggctaagcaacttaccttaggtcacacagtaagaggaagagtgagccaggatttgaaccctcgtgtatctgacataaaggccagcatcccatctataaaatggggctagtaatcataccagcctcttcaggtttttgtaaagatttgatgagaaaatatacgagaagtcactttatgaactgtggatcacagctgagtgtgacacgtcatcactattgtcgcccatcagtcaattatctgggatagcctgaggttgtgtcatacctacataagccacagaaaaatagactcatgaaagaatcagggctgggcatgaatgaacgagaaactacatttaaatggagcccagactgcacgggaaccaaagtggggttctaataccattgggttgattacctatggcagaaacagcccaagcaaatatgtgaccaaatgctaacatcacacctaaatgtctaagctgttctgtaattttgaacattaatctgttttcaggggatgatccagggaaaagaatgaatcaagccattgctgtggtatttggaccagtggccacttgccattgacttggtgagaacgaggatgcagatttacttttcatgctcttaggagtataagtctaggatctgggtccactctgaggaatctttcctctccactcccactggctattaggaatcttaggaaccaataagctagaaacttgactgtttatactttcctcatttgtttcagtggattaaggtacctaattgttccataacaccctacggtttctaactggctttcatttaacattgacaccgttaatgccaccacgcaagaatgaactgtttacttgcctgagaaattgcatgtgggatttaaaactttttctaagattcattttttcaactgatgatctctcaggagtattttctggtggtgtttgagacagtgactgatgttggcattttcccagggtgtggaagcccccaagtttaaagcccagctgactccgtgtgccagatcttcacacaagaaggaccagtgatataaggggttctccaattataaaattaacaactgggagggataaaaaaatcgcaccactaactttggagaattagctgagaaaaattttacgtagaggaaaaaagacttggaaaattgtcttctgaattaaacatattagtcttcttcaggtagcagcaaatagaacaattgattgtgaccgagtgcctttctttctttctttctttcttttttttttttttttttttttttttgagatggaggtttgctctttgttgcccaggctggaatgcagtggtatgatctcagctcactgaaacctctgcctcctgggttcaagcgattctcctgtctcagcctcccaagtagctgggattacaggcacccaccaccacacccggataatttttgtatttttttttttagtagagatggtgtttcaccatgttggccaggctggtctcgaattcctgaccttggtgatccacccatcgtgggctcccaaagtgctgggattacaggcatgagccaccacaccaggcctccaagtacctttcttatggaccaagttcatttccaatattttagcagtggcgttaggtagactgtatatgatgattctcctaaataaggttattctctttctgttaaatatggttttcattgatttatggatgtatctggaactattattttggcaggttttacaaggcctcagaatcggttcggatgcaggaactgtgtttgacgtttatgtcgaagttctcatcaaagcctggaaaatgtggagcctcttttgcaagagtggagattgttgcctttaagccagatcttaaacactgttagctcattgtgaaaaacacaagtgccagtgattaacaaagaatgtttacttaatttacttcagatctggtctcagttaaaggttagctcatccttatcaggtggtcacagaaactagatcccagtagcagagtgacctttggaagctagaattgtagtcaatggacttaaagtgagatcgtgggagccagttcttcacttaattaagcagagttgaaagactttcttctttccagctccctattttccttccttgggctattttctgtaagtcagacttggtttgcctcaatactacatatgccctgtaaaaataaattaactacaagagactgttgactgtatggccaccagccctgccctggtgtgtgtcctttgcaacactagtgtctgaggtggagccctccattcctcgtgtttttcatccactccccctttccttcctctcccccgccagtagaggactgtttgcgcaagagaccaatggattagccagcaggtctaagcagctgcaaggataggtctctcttttgcccgggggagagagataccagcttgactcgtgatcaggtactttattccttatgatagggagctcagaatccagcatcagtgttcctattaatttcttgttagttttgtagctttgggtatctgcacttgtcaacagtaggctgtaagaatatttattggaaaccacaaaaatctcactagcctcctctatcccggagcctgggatggcaaagtgctacaccagaaaagggctatgtggatcacaaggacagtgtaggcctcatgactctgagataacagaacagaggcacagagaggctaagcaacttaccctaggtcacacagtaagaggaagagtgagccaggatttgaaccttggtgtgtctgacataaaggccagcatcccatctataaaatggagctagtaatcataccagcctcttcaggtttttgtaaagatttgatgagaaaatatacaagaagtcactttatgaactgtggatcacagccaagtgtgacaggtcatcactattgttgcccatcagtcaattatctgggatggcctgaggttgtgtcatacctacataagccacagaaaaattgactcatgaaagaatcagggctgggcatgaatgaatgagaaactacgtttaaatggagcccagactgaacgggaaccaaatgtgggttctaatgccattactcattactgttacccaaatatgatcctgctcccctgggagggtggctctgaccttgtcactcccaagcctggcacccccagagcatgctagagtggtggtggagggcaaagatgacaagacatggactctctgggttagggtgagtggcaggcaacagaatccacagaatagagaagtacctagattgggtactctgggagaaaaacaaccttccggagattttcccagtgtgccaaatcctgtgctacccgagagaattcccactcatcactgccaaatgaaccacggaagagacagaaactttgctcctgtgtttcttttaattatgtggattacagacacgttcaactttggttctatgttaagaaaattcaagtttaaatgactcccaatttaagtgatggtatttaaaaataaattttgtgttatctaagacaaaaattgtactttgtcttaaaaagatatctggcttggatgggtcagaggggtacggaacagggtggccttcatcagtagctacaaaggcttttgcaaccgtgggctaattgcaaatgtccttcatgaaacacaggctaagaccagatttcatttgtgaaacacattgatacccaataagacctaggaattgcatgagcagatttactaacaaaacattgctttattgaaatcttagatgtttccgcattttatgtctacatgttgagaaatggcctcaaccataatcaaaatcacatttcccttaaaagcagcatgttccagacactgtgttgagagtcttccacacgttatctcgccaatctaggctttattagtcttatttacagattaggcaactgaagctcggggaagttgagtaacttggcggggatcacatcacaggtagagcgtggagctgatccaccagctgatctgaatcacatctccctgcagagcctgggatctgaatccaccactgaggctggctgcctctgagagctgtattcacaaggaaggattttgcccagtgtcttcacaccctgccagccacatcctctgggacagacctcaaaaccctgctaagttagcagaaactctgaggtctgcccagtgagctgggaaggcttatttggactcttccgagccagagcagaaaagcacccagaggcttcccagtgagcagagaggggcctccctccttgattgaggcatgggaagggctgtgtatttgctgagcactctgagaggagacgttcagcactggggtggcatagatcagaattaacagaattaagccagtgcttttggcctcaaagggggtttctccatcccagattgggaacatccctttctgatggcaaagagtctctggaccaaggagcacctagattgcaaagctcccaggaattaggcccacactctgcattatcattgtgccctatgacaccgtatgtgcagctagacagccagattcagggaacagcaaggacaggaagagttccagacgatatagtcctttccttactttacaggtggtcctaaagaaggagagaaactttcctggcagtgttgcaactagaagctaggtctcctgagccccacaccgtcagctgtccatgagcaccggggaaccaaatgttagcagagtgtagcagcagcttcacacatgggagggtgctgagatggtaagcctcgtccatggaaagtgttccttcaatgttagcggaataaggaacaaatgagcagtttcccacagcaaatgtcttcctttgacagtcacccacatagatctctgacctgctgcagctcagcggaaggcagcctcccacaagttgaactctttttggaaaagaaacagtaagtatataaaacagtcttgctgaaaacttgtaaagaggtacgtaaccattaaaataattataaagacaatttagcaacatgaacaaaggcttgcaataattagcagtgaaggaaaaaaataatcctgaaattgagtttatgccatgagtacaattgtgcagaaattatgttggtatagggtgggactgctcacaatggctcacattcattaaacactcactgccccatgatacaggctcagtatgaagccctttacggaggtgatctcattcaacgcccctatagccctgtgagtggggactattggaggtcctatactcagatggcagactccggaacctacagtcttaaccattgacttgaacccattgacttgaatgaatggaattttgttctttttctttatgttatttgagtatttaagagaaaaaaaacacattattttctagagaaaagaaattttgagagccaagagaaaggttagcatcccatctcatgagcaagaggggcatggtctacacaggtgatccagcccaactactttattgaattgaatctgaactgaaatgtcttgaaaccctgtcctggggccccaagtcctgtgatattgtaagagtggcctgtgctaaaatatggagttgaattgttaggcaaacaccacaccagcataagagaagaaactcgccccaaaatcagccccctgagcaggcttggaatgccagccaagaggttgcagcaggctggctagaggccccgccagcctgaaatgagagctctgtactactgtaactactgtttacaatgtggtttaatgagaattggaactagccctactattagcagacagcatcagggcggaggcccccagcccagaccccatggtcttccccatcccgaagtgggatggatttcctcatctgcatacacagcacttcgtcgatataaatggtgttctctttgacctggatctcctcctgcagggcaagctgtctgcgatgcagccctttcagctctgcctgagcttgggctaaagtttccttcaatctaggagaaagggaagaagagaagagaataatttctctctatgcattgctttttcaagggaaagaatgttccccagtgttcagtgcaggagccaaattgatatgtgctcttccccttcctctctcctcatgaagacagagatctcactaattttagaataaaatgcatactgaaaaggccatgaaaaaaagaaaaagacagagatttcaatttggcggccacaggccagattcatgacgtagacaccttatgaaatgctgatgtttaaaactgcagatttgacctaaacatctggatttgggcttctttagaatcactcaatattgggatccattttctccaaggcaacaattttggcgggaggtggtggagacttccctctagggggcattcctcaagcattccagagcaggctggcttcattcacgctgctggtcactatctagcctctgcttgatatccaggttgggattgagacccgaaggccctctgcccactggctgctagcctaccttgcgacattgtgggtgatctcttgaacctccttcattagcctatattgtgcgacatcacgacacagctccacgttcggccggtgtgtcctggtctccaagcgcgtatgagccaccttggctggcccttcttggtcaaggatggccttttcaagagctgtaatatttttctcctgggaagcaatctcttccatgaccttacaaaaaggattagagtaggtgaggccaagctgtgctcctcaaaactcaacagctgacagcagatgggttgtgatcatgtaagttaggaagagggaacctcagatttcttcttaagcagcatgccagagtctgatctctcttccctaaagcagtgattgctggtgggcaaggtcacataagacttaaaaccttatggactcaagggacaggacgggccattgtcacctcatctacccacaggagatgccctcagcaaaggcctggccagagtggggatctcactactgctcaaagctgcctgctcaccttggtacagggtacctttgtatcatgagcagaaagctgcctatttcctcaccactcctatcctgctagcaccagctctgtcctctggaagcctgaggaaagaaggagcagttgggtctgagtttggttgttatttttgtgagtgactttatgcacagaaaaagactacttttaggccagatgtggtggctcacagctgtaatcacagcactttgggaggctgaggagggaagatcacgaggttaggagttcgagaccagcctgccaacacggtgaaacccccaactctactaaaaatacaaaaattagccgggtgttgtggcacacacctgtaatcccagatactcaggaggctgaggcaggagaattgcttgaacccaggaggcggaggttgcagtgagccaagatcgtgccactgcactccagcttgggggacagagtgagactccgcctcagaaaaaaaagaaaagaaaagaaaaagactacttttaagttacttggttttaacaaaattaatatttaactggtttaaaatatatttcttcattaagcattttttttaaaacttgtacatctacttttgcaatatacacaaaagtagatagactaaggaacctcgcatagtcatcagcagtttcagcaatgagcagtatgtggccagtcttgcttcatctatactcctgtccatcagcttagttattttaaaactaatcccagatattatgtccttttagttaaatatttcacttaaatatttgagtgtgtatttctaagcataggattctttattttcttttgacaaaaccacaatacctttatcacaccaaaaaagagacaaaagacttattctttaacattataataatatttagtgatcacatttcaccaattgttccatatattttggtagagttggtttgtccaaattacatcccaatgaggtccagaaattgcacttggctttcttaagcttctatttaaacacttcttaaggttttcataagtccggttcacagatatactatttttaaatttagcagatattagcaattactttaagctgctttcgactaataattgctcctacttcaaacttacttaaagtcctttgaatatttatttaaagcagcatttataaatttgatacataactttttaaaatatttgaattatcttttttttttggcctggaattttatttatttatttttttaaggtgaattttatttttttatttttttattatactttaagttttagggtacatgtgcacaacgtgcaggtttgttacatatgtatacatgtgccatgttggtgtgctgcacccattaactcatcatttagcattagttatatctcctaatgctatccctcccccctcccccaaccccacaacaggccctggtgtgtgatgttccccttcctgtgtccatgtgttctcattgttcagttcccacctatgagtgagaacatgcggtgtttggttttttgtctttgcgatagtttgctgagaatgatggtttagaacttcatccatgtccctgcaatggctgcatagtattccatggtgtatatgtgccacattttcttaatccattctatcgttgttggacatttgggttggttccaagtctttgctattgtgaatagtgccacaataaacatacgtgtgcatgtgtccttatagcagcattatttataatcctttgggtatatacccagtaatgggatggctgggtcaaatggtatttctagttctagatccctgaggaatcgccacactgacttccacaatggttgaactagtttacagtcccaccaacagtgtaaaagtgttcctatttctccacatcctctccagcacctgttgtttcctgactttttaatgatcgccattctaactggtgtgagatggtctctcactgtggttttgatttgcatttctctgatggccagtgatgacgagcattttttcgtgtgtcttttggctgcataaatatcttcttttgagaagtgtctgttcatatcctttgcccactttttaatggggttgtttgtttttttcttgtaaatttgttggagttcattctagattctggatattagccctttgtcagatgagtagactgcaaaaattttcttccattctgcaggttgcctgtttactctgatggtagtttcttttgctgtgcagaagctctttagtttaattagatcccatttgtcaattttgtcttttgttgccattgcttttggtgttttagacatgaagtccttgcccatgcctatgtcctgaatggtattgcctaggttttcttctagggtttttatggttttaggtctaacatgtaagtctttaatccactttgaattgatttttgtataaggtgtaaggaagggatccagtttcagctttctacatatggctagccagttttcccagcaccatttattaaatagggaatcctttccccatttcttgtttttgtcaggtttgtcaaagatcagatggttgtagatatgcggcagtatttctgagggctctgttctgttccattggtctacatctctgttttggtacaagtaccatgctgttttggttactggagccttgtagtatagtttgaagtcaggtagcgtgatgcctccagctttgttcttttggcttaggattgacttggcaatgccagcccttttttggttccatatggactttaaagtagttttttccaattcagtgaagaaagtcattggtagcttgatggggatggcattgaatctataaattaccttgggcagtatggccattttcataatattgattcttcctacccatgagcatggaatgttcttccatttgtttgtatcctcttttatttcattgagcagtggtttgtagttctccttgaagaggtccttcacatcccttgtaaattggattcctaggtattttattctctttgaagcaattgtgaatgggagttcactcatgatttggctctctgtttgtctgttattggtgtatacgaatgcttgtgatttttgcacattgattttgtatcctgagactttgctgaagttgcttatcagcttaaggagattttgggctgagacaatggggttttctagatatacaatcatgtcatctgcaaacagggacaatttgacttcctcttttcctaattgaataccctttatttccttctcctgcctaattgccctggccagaacttccaacattatgttgaataggagtggtgagagagggcatccctgtcttgtgccagttttcaaagggaatgtttccagtgtttgcccattcagtatgatattggctgtgggtttcttatagatagctcttattattttgagatatgtcccatcaatacctaatttattgagagtttttagcatgaagcgttgttgaattttgtcaaaggccttttctgcatctattgagataatcatatggtttttgtcattggttctgtttatatgctggattatgtttattgatttgcatatgttgaaccagccttgcatcccagggatgaagcccacttgatcatggtggataagctttttgatgtgctgctggattcagtttgccagtattttattgaggatttttgcatcaatgttcatcagggatattggtctaaaattctctctttttttgttgtgtctctgcctggctttggtatcaggatggtgctggcctcataaaatgagttagggaggattccatctttttctattgattggaatagtttcagaaggaatgataccagctcctccttgtacctctggtagaattcggctgggaatccgtatggtcctggaattttttttggttggtaagctattaactattgcctcaatttcagagcctgttattggtctattcagagattcaacttcttcctggtttagtcttgggagggtttatgtgtcgaggagtttatccatgtcttctagattttctagtttatttgtgtagaggtgtttatagtattctctgctggtaatttgtatttctgtgggatcggtggtgatatcccccttatcattttttattgcttctatttgattcttctctcttttcttctttattcatcttgctagcggtctatcaattttgttgatcttttcaaaaaaccagctcctggattcattgattttttttgaagggttttttgtgtctctatttccttcagttctgctctgatcttagttatttcttgccttctgctagcttttgaatgtgtttgctcttgcttctctagttcttctaattgtgatgttagggtgtaaattttagatctttcctgctttctcttgtgggcatttagtgctataaaattccctctacacactgcttcgaatgtgtcccagagattctggtatgttgtgtctttgttctcattggtttcaaagaacatctttatttctgtcttcattttgttatgtacccagtagtcattcaggagcaggttgttcagtttccatgtagttgagtggttttgagtgagtttcttaatcctgagttctagtttgattgcactgtggtctgagagacagtttgttatgatgtcctttcttttacatttgctgaggagtgctttacttccaactttgtggtcaattttggaataagtgcggtgtggtgctgagaagaatgtatattctgttgatttggggtggagagttctgtagatgtctattaggtctgcttggtgcagagctgagttcaattcctggatatccttgttaactttctgtctcgttgatctgtctaatgttgacagtggggtggtaaagtctcccattattattgtgtgggagtctaagtctctttgtaggtctctaaggacttgctttatgaatctgggtgctcctgtattgactgcatatatatttaggatagttagctcttcttgttgaattgatccctttaccattatgtaatgccctcctttgtctcttttgatctttgttggtttaaagtctgttttatcagagactaggattgcaacccctgcctttttttgttttccatttgcttggtagatcttcttccatccctttattttgagcctatgtgtgtctctgcacatgagatgggtttcctgaatacagcacactgatgggtcttgactctttatccaatttgccagtctgagtcttttaattggagcatttagcccatttacatttaaggttaatattgttatgtgtgaatttgatcctgtcattatgatgttagctgattattttgctcatgagttgatgcagtttcttcctagcgtcgatggtctttacaatttggcatgtttttgcagcggctggtaccagttgttcctttccatgtttagtgcttccttcaggagctcttgcaaggcaggcctgatggtgacaaaatctctcagcatttgcttgtctgtaaaggattttatttttccttcacttataatgcttagtttggctggatatgaaattctgggttgaaatttcttttctttaagaatgttgaatatcggcccccactctcttctggcttgtagagtttctgctgagagatcagctgttagtctgatgggcttccctttgtgggtaacccaacctttctctctggctgcccttaacattttttccttcatttcaactttggtgaatctgacaattatgtgtcttggagttgctcttctcaaggagtatctttgtggcattctctgtatttcctgaatttgaatgttggcctgccttgctagattggggaagttctcctggataatatactgcagagtgttttccaacttggttccattctccccatcactttcaggtacaccaatcagatgtagatttggtcttttcacatagtcccatatttcttggaggctttgttcgtttcttttcattcttttttctctaaacttctcttctcacttaatttcattcatttgatcttccatcactgataccctttcttccagttgatcgaattggctactgaggcttgtgcattcgtcacgtagttctcgtgccttggttttcagctccatcaggtcctttaaggacttctctgcattggttattctagttagccattcatctaattttttttcaaggtttttaacttctttgccatgggttcgaacttcctcctttagctcagagtagtttgatcatctgaagccttcttctctcaacttgtcaaagtcattctccattaagctttgttccattgctggtgaggagctgcattcctttggaggaggagaggcactctgatttttagagtttccagttttactgctctgttttttccccatctttgtggttttatctacctttggtctttgatgatggtgacgtacagatagggttttggtgtggatgtcctttctgtttgttagtttttcttctaacagtcaggaccctcagctgcagttctgttggagtttgctggaggtccactccaaaccctgtttgcctgggtatcagctgcggaggctgcagaacagcggatattggtgaacggcaaatgttgctgcctgattgttcctctggaagttttgtttcagaggagtacccagccgtgtgaggtgtcagtctgcccctactggggggtgcctcccagttaggctactcgggggtcagggacccacttgaggaggcagtctgtccgttctcagatctccagctgcatgctgggagaaccactactctcttcaaagctgtcggacagggacatttaagtctgcagaggattctgctgccttttgtttggcagtaccctcccccagaggtggagtctacagaggcaggcaggcctccttgagctgcagtgggctccacccagttcgagcttcagggctgctttgtttacctactcaagcctcagcaatgacaggcacctctccgccagcctggctgccaccttgcaatttgatctcagactgctgtgctagcagtgagcgaggctccgtgggtgtaggaccctccaagccatgtgcgggatataatctcctggtgtgccgtttgctaagaccgttgggaaagcgcagtattagggtggaagtgacctgattttccaggtgccatctgtcacccctttctttgactaggaaagggaattccctgaccccttgcacttcccgggtgaggcaatgcctcaccgtgcttcggcttatgcttggtgcgctgcacccactgtcctgcacccactttccgacactccccagtgagatgaacctggtacctcagttggaaacgcagaaatcacccatcttctgcgtcgctcacgctgggagctgtaggctggagctgttcctatttgaccatcttggctccacccctatttaaattatcttaacaaataagaccttctggagttcttaaatagatttgtcaatctaacaaattagtaaaaaaagatgatgctttaaattttcttaaatattcgaatgctatcttcaaatttaaagtttcaactaaaatcataaggctaaaacaattatttaattatatattttaaagaaatttttaaaaaacaggccaaatctcttaaattttacaaataccttaaccatccaaaatacatagatagcaatacacttataataaaactactactgctatgagtgagatcaagaatcagcaaactatggcctataaactaaatccagtctgcaacctgtttttgtacagactgtgaaataagattttttttaagtaataatcttcaatttctttagagctgttttaagtttaaagaaaaattgagcagaaagtagaattcccatatgctttctccccccatccaggttttccttattattagcatcttccattagtgtggtacacttgttattaatacaattgatgagccaatattgatatattattattaactaaagtccacaatttacattagggttcactctttgtgttgtacaatctatgagttttgtttgtttgtttgcttttgttttttatggagtcttactctgtcacccaggctggatagcaatggcatgatctcagctcactgcaacctctgcctcctaggttcaagcaattctcctgcctcagcctcccaaatagctgggattacaggcaggcgccaccacagccagctaatttttgtatttttagtagagacagggtttcgctgtgttggccaagctggtcttgaacctctgacctcaggtgatccacccgcctcagcctcccaaagtgctaggattacaggcatgagccaccgcgcccagccgattctatgggttttgacagatgtataactacatgtatccactttacaatatcatacagaatatgttttgctgccctagaacacccctgggctgcttccattgatccttccttccttcttccacccacccaaacccctgacaaccgctgatctttttcatctccatagttttgtcttttctagaatgtcatatagttggacttatgattcatatcatacagtatgagtttcaaatcagcttctttaacttagcaatacgcatttaaagttcctctatgtcttttcatggcttgatagctcacgcctttttagtgctgaataatatttcattgtctggatgtaccacagtttatccatccattcacctatcttagctgtttgcaagttttggcaatcatgaataaagctgctatagacattcatacacaggtttttgtatgaacataagttttcagcccatctgggcaaataccaaggaaggagattgctgaatcctaagagtatatgtttagccttgtaagaaactgccaccctctcttccaaaggggctgtaccattttgcattctcatcatcaatgaatgagagttcctgttgctccacatcctcaccagcatttgggggtgtcagtgctttggattttctgtaggtgccgaggtgttgttgttttaatttgcaattccctaatgacataggatgttgagcatcttttcgtatgcttacttgccctctgtatatctgtattggtgaggtgtctgtttagagcttttgttcatttttgtagttggtctgttttcccattgttgaattttaagagttctttgtacgttttggataacaattctttatcagatatgtattttgcaagtattttatcccagtgtgtggtttgtcttttcattgtcttagggatttttaaattttaaatggttggggagaaaaataaaagcagaatatcgtcatgtgaaaattacataaaattatatttttaatgcccataaataaagctgtattgaaacacagccatgcttattcatttattattgcttctgaactaccatggcagaattaagtcatggtgacacactgtatgtgatgttctcacggctttgcactgttgcccagagcactataaatcacagtgacatgtatataacttgacagttttccaaccatgtatcaccatacagtgacatcttactattttatttttatgcattttttttgagatggagtttcgctcttattgcccaggctggagcacaatggcacaatctcggctcactgcaacctctgtctcccaggttcaagcgattctcctgcctcagcctcccgagtagctgtgattacaggcgcctgccaccacaccaggctaattttttgtatttttagtagagacagggtttcaccctgttgcccaggctagtcgtgaactcctgacctctcaggtgatccacccaccttggcctcccaaagtgctgggattacaggcgtgagccaccacgcccggccgtgacatcttattttattgttttattaccagtatgtctttgtttctgctccttagcctcttctcttcctctcttctcttctcagtgctctcccatcctcccttctgtcctatctcagatccatctttcaaggcctatactaagttcttattccaccaggaagtctctggattattccttggctatcatcatcatcatcatcatcatcaatcaactatttttattatttatatgtatgatattatatgttaatcatatatgcaaaatgtgtgtgtgtgtgtgtgtgtgtgtgtgaaatgtatacatgccaggcactgttctaaatattttatatgagttgtctaacttaaccctggctggggaagactattgtttctccccattttatcaaggaggaaactaaggaacaggggagttcagggtctccctaaggtcacacagcaagtgttgaagccacagttcaaacccaagatgtctggctctgacgtctacccatttccactaggctcgtctacctctcggtttgctgaatattgcagtttcaccctcgatgatactctggtttctccagcacatcacagaaataaatcttgtccacaactggactctgagctctgggagggagtgttcaggatgtggcaacaggacagggattcaggggctgagaaggcctgggctccactcccaccgtgccgccttggggcccttcccctctctgtttcagcttcaccagcagtaaagcgtagggtgggctgacagtggcctgctgaaatgtgtagcttgaaatccaccaatgtgggagtatttgtactacagacatcgacaaattctacaggaaggaccctaatctgtagaatttgccgatatctgtggtacaaatgctcccactttgtatttgcagtacaaatactaaccccctctgatatggtttggctctgtgtccccacccaaatctcatcttgcattgtaatccccacatgttgagggaggaatctggtgggaggtaattggatcatgggggcagcttcccccatgctgttctcatgatagtgagagagttctcatgagatctgatggttttaaaagtggcagtttcccctgcactctttctgtctcctgctgccttgtgaagaaggtgctggcttctccttcaccttctgccacgactgtaagtttcctgaggcctccccagccatgtggaactgtaagtcaattaaacctctttcctttataaattacccagtcttgggtagctctttacggtggtgtgaaagtgactaaaacaccctctgagagccagtttaccagcgcaacactgtataaccaggagaaacgaccagctagagtcctaaagctccaaccgggtttggaaaaactggctgcatcaactcctgtaacttcagagtcctaaagggcacgtgagagcatgtagtccatttccgtacttcacatacggaggagtggcaactggagtgggaagacagccaggcacaaagctgcaaccagcccctaagcctcccgtctcctgcctcagggttctgttctctgcatttctgttctctgcagcagtgagtgacaatggaggcccagagtggggcaaagtcccgctccagtccccaaaaatgcaaagcctgctgctaagcttgagagatatgaatgacccttacccacgagttaacccaatatcccaagcccagaagtctagcggtctggcccagggggcattcttgttttccatggtgaaagctcctgaatctgctcttcttccatgctccctcaagggacctcaccttggccagatgatcagccagcttgtccctggcatcctttgtatccttcagcccattcttgaatgccgtgtccaccacatcacactgcttgcgcagatcattggctgtctgggacaggattcgatccaccagggctttcagcatcagggagttgttccgctgcttgtcagccttctccacattggtgctggagaagtccaaccagtcttccagactcacggagctgaaacagacctcacgctttcattcacagcatatttggggtggggaagggggttgggagagagggacgagctacaccttcccctcataagaaccacctagaatgttaccctatctctaggcagagcaaatagtggtctgtcagtatcaatagctgtcactttgggcaacctccctactctggcattgggctggcaccttatagacattatctcatttaatcctcatgatggccaagtgagctaacttttctaatccccattttacagatgagggaaactgagctcagaaaaatgaagtaacttgggtgagattgctcagctagagataatttgagcatcaaaataatactaatgtaatagattacactgaataaaatagaaaccatccatctatacagatttaaataaaaaagtgaataaattactcgtttgaagaggaactatcttctggaacgacactgatgaacttcaaaataatgttaattggaagaaaccagacacacacacacacacacacacacacacacacacacacacatatctagtatataatgctgtttaatgaaaagcaggcaaaaccaacctattacaagtcaggaaagttattaccttcaggatggagggagggactattgattggaagaggacaggatgatagggatggtgataatgttttctttcttgacctggtggtgatatgaggctttgttcagtttgtgattagaagcagcctctgagatggcacttagtgatcccccctcctggtattcatgcctttgtgtaatcccctcgccttgagtatgggatgaatttattgacttccttctcacaaatagaaggatgtcacttctgggattaggatataaaaaagactgtggcttctgtcatccgttctctctctctctctctctctctctctctctcggatcactcattatgggagaaaccagttgccatgtcatgggacatccccatggtgaaattcacaaggcaaggaaccaaggcccaccatcacccacaatcagcttggaattggaccccacccgggtcaagccttcagatggattgcaaccccagcagctggcttgactacagcctcagaagacatcaagcctggggcacccagttgaacagggcctggtttccccacccaaggaaccatgagataatacatgtttattgtcttaagctgcaaagttttgggataatttagtatacagcaaaagataactaacacaatgagaatgcttcaaacttgtgcacttttctatatgtatgttttatttcaaaaagaaggttttaaaaattaaagtgagttaggctgtgatataatgttaaccgaaaaatgcaaattagatgtcacagaaaaggtacatagtataatctcatttttataaactaaacaaagtttaccgtatgtgtgtgagtgcacatgtacatatgtttgtatgaacatgcagctaacaccagttatctcagtggatgtaaaaacagaaaggggaggccaggggcggtggctcacgcctgtaatcccagcactttgggaggccgaggcgggcagatcacgaggtcaggagattgagaccatcctggctaacttggtgaaaccccatctctactaaaaatacaaaaaattagccaggcatggtggcgggcgcctgtagtcccagctacttgggaggctgagacaggagaatggcgtgaacccgggagacggagcttgcagtgaggtgagatcgcgccactgcactccagcctaagtgacagagcaagactctgtctcaaaaaaaaaagggggggggaaattcacttgctcttcctacatttttagattattttacttgttaaaaacatgtatagatgaaggaataaaatgttttattctttaaaggtttaaaggttttatgtcagactttcttagttagtgagcctaacctggagaatcaggagcctctgggcccaatgtcaaggtcaccattcaatgctgcctttgccccaagcccaccacttccaagctctcagccagctgcaaggacgagccgctaggtcttgcctatctgagaagcactgggtcacccgcgaggaggaagacggcaaggcccactcactttggctcaatcctcacggcgttctcagaatatctgatgtttggtgagttgttgttgagcgagaagcagatatcatctatggtcagggccacaaacttgtccttcaaatccttctcaagattgtacttggcagagcggttcatcctgaagggagaaagtaaactgggtttctgcctctggagtgcccaggtggcacccacgtcctcagagaggtcctggaaagtgaagctgcagctaggtctggtgcaggatgatggtactgccccccacccatcaccccaacactcatgcgtataccatttgatgcccggtgacaaatcaacgtaaccaaatgtggacttggagattctcccttctactgttacattttccagtgtcaccattgcagcctactatgtgtgaggggtcagcctcaccagtgggttccagcgtcctccagtttataaccagggtgaaatccagctccagccccacccttaccagagggcggctgccatgtatgagggatgtggccagctcttaccctgagtgctggggcaatctggggacacaaagtgggagcgggaatgttgaacccctttctttctgtgccatggagcccagcttttgtggacactgccttttctcaaaattcccagtggagatttggagggcaggccgaagagtcataccgaatctgctcggaagcctcctccaaggtacgggtcagcagagccataatgccctggatgatctcagcctcctttatcagctcatgctccactgtgtcgtgcaccaggtcaatgccaatgcgcttctccctggcagggggaaaggcagccagtcagccaacacgtgcaacatgaggtgactcaacattggctaatggctgcacactcagaactatctgcacgactgatttgagtgtcacccgatccatccgatgacacagtgggtgacagatattagttggtgtctatgtgacttcaaaatatccaaacacaatgaagaaaaattgattgatgactggtcacttggtctgaaacatgccaaatggacttttttttctctctctctttttcttttctttgtattttttttaaattatactttaagttctagggtacatgtgcacaacgtgcaggtttgatacataggtatacatgtgccacattggtttgctgcacccatcaactcatcatttatattatgtatttctcctaatgctatccctcccccagccccccacaccctgacaggccccggtgtgtgatgttccctgccctttgtctaagtgttctcattgttcaattcccacctatgagtgagaacatgcagtgtttggttttctgtccttgtgatagtttgcgcagaatgatggtctccagctgcatccatgtccctgcaaaggacatgaactcttccttttttatggctgcatagtattccatggtgtatatgtgccacattttcttaatctagtctattactgatggacatttgggttggttccaagtctttgctattgtgaatagtgccacaataaacaaacgtgtgcatatgtctttatagtagcatgatttataatcctttgggtatatacccagtaatgggattgctgggtcaaatggtaattctagttctagatccttgaggaatcaccacactgtcttccacaatggttgcactaatttaccctcccaccaacagtgtaaaagcattcctatttctccacatcctctccagcatctgttgtttcctgactttttaatggttgccattctaactagcatgagatggtatctcattgtggttttgatttgcagccagatggactttttttcccaagaagaggaaagttttaaataataataataaattcaaagacttgtttccttccttgatcctcattcagtgtttagacaaacaattgaacatagaaagatgttttagggtgggcgcagtgactcacgcctgtaatcccagcattttgggaggctgaggcaggtggatcgcctgaggtcgggagttggagaccagcctggccaacatggagaaaccccgtctctactaaaaacacaaaattagccaagagtggtggtgcatgcctgtaatcctagctactcaggaggctgaggcaggagaatcatttgaacccgggaggtggaggtttcggtgggccgagattgcaccattccactccagcctgggcaacaagagcgaaactccatctcaaaaaaaattttaaaagatgtttatagtaataataactattaataataataacaccaatagtaatattgcctctgccagtgagcacttactccatgacaggcattgtgctgagctttattaatatataaacattctttcttagccctttcaagtacagatggggaaactgagtttcagagagactaagtgatctacccagtgtcacagaactgtgtgccacatgtgcttctagccaagatgccatcctcctcccaaactgaccctgctacacaacgttttgctctttttcaacctgcatgatagtgcttggaaaggaggttcccctactcactagctgggtgcccttagccactatataacctacctgtgccttggtttccttttctgtaaaatgggggtaattattagtacttcataggattgtggcacactacaaatgagctataaaagcataagctacagtacctggcacatagtacatgctcagtaaacttagcagcctctacgttatcattatcctcaggcttagacttgagccaactgggtgttgagctctttgatgagctgctatttctctttgcttcatagatttctaaatctggctggggagactgctgcctggttcctgcaacgggtcctgtttaagcttatggaaggaacagggctttccaggaagacaggggcatggtgcatttgagaaactgcaagtagctccacacacctaagcacatcccactactggggacaagatatggatccagagaggtcactgggggccctatcatgatgaaccttggtttgctaagctaagaagcttaaaatttatcttgaagccattggggtttgaaggattctaagcatggcggtgaccgggaaaaatctgcatttggaaaagttcactcaacagccagtgtgcagggtgcactagattataggggactatgctaacagcaagaagacctgttagggcactccagctaggtctgcggcagaacccaggtctggaaaccagcatcaccccagagtagaaaggatcattctattcactggatttataggagggaaataataataaaaagcactatgttcctatagtgctgtctggattacaaagtgcttccgtgtggctctgcatgggagagacatactgtcccctgggagctgtagtgtctgttctcaccttcttccttggcaacagaacccctggttttttggctgagcacctggctgcccaaagtaaaaccaatcatttcccagcatctgttggtgtggccatgtgattaagttctgtcaataggatgcaaatagaaatgatgaatgccagaccccacttactcctacttgctggaatgtagacataatggctggagctccagctgccaacttaaaccacaaggtaacattaggagtgaaagccatgtgcagtagaacaagaagatagaaaaagcctggaaccctaaaactgtggcccaccattccaaccctggactgactatctctagactctttgaatgtaagagagaaagaaatcgttttctttaaattcaatattattttaaagttttctgctacccacagccaaacctagtcctaacatatttgagttgagttagtcaagagcagagttgaggcatgaaccaagtccagtgccccttgcactgcccagcaccaggggcatgctgggataacttcaggctctaaaagaacacctgctcaagtgctgtgttctaactcaccatcgcacacagccggcatttactacccagcatctcatttgtcacaacacatgaatcatttgagggaccttcgctcctacctgtatgccaggcatgtctcagtgatgtgcaagggctctttcaaggtctccagggctttttccaatctgatcttatatatgagtagatcatcagttacattcacaagctgctcaagtttgtcatctaactccttcttccagaactggacttcctcgagtctctgttctgaagcacacggggaagttacaccagggctaatctatcccaaggtagccaacatttgaattagaaacttgaagactgttgtaaaaccacctgtgacatgctcttttcctcttagtgctgtgctatttggggcatcttttcatctttttaaatgtttatttgcaggaaggaaggaagatatattttcttacagtccacatcagatttatcattctacacccactagttcttcagtgcccactgtttttaataacttttaattttatcaaagatataaatgtgtgttgttagaaaagtcaaatagtatcacaaagaattaaaactctctgacctgtccccatccatttgagacggagtctcactgtgtcacccaggctggagtgcagtggtgcaatctctgctcactgcaagctctgcctcccaggttcatgccattctcctgtctcaacctcccgagtagctgtgactacaggcatccgccaccacacccggctaattttttgtattttttagtagagactgggtttcaccatgttagccaggatggtctcgatctcctgacctcgtgatccgcctgcctcggcctcccaaagtgctgggattacaggtgtcagccactgcgccaggccccttatcacttctgacatttgcttatactgctattcactcattatcagttttgatattatatgttgatttcctgtgatgaaagataatgatttgctcttaaccaactcacacaacatacttccgtctcccaatatagttgtatcaccattttgttaaacaataaataagtaaacttactatttatttacattttgtaaatatataaatgttatttacacctgagccctatcatacactgtaataaatttcttttcttacaaaattttctgttttggggaggagttaaaatggcatttttgcttcactttcttttttaaatgataattaaaggcagatttattagtcaccatgagtaaaaaatgactgattatactaggaaaacaattaaatatatatatatttaattgataatgagtagttcagcatttgaatcttaaagtcataatgtactggttgtagtgtcagtttccacttctgtaagctgactctgttttaaaaaaaaatgttattgtatatatttgaggtttacaacatgacattatgagatagtaaaatgggtagcatagtgattccttcagtttctttatattattaattttttctcaatatgccctcaatatattccaacccatcaagtaagctatcaattttctttcctccttggagatgtctctcctagagcatcttctcctcctgctggatgagttgctctctagtttgctgtgtagctgtcatcctatgactttgcttccaggaatccccttcactcttctcctgttgctgtcccgtttcctggattgtatttcttcctcttccttgatttactctttcagtatgctgaagcatatccttcagtaacttcctaagaaatggatgcatgtgaggtaaagtttttgaaaacctgcaagtctgcaaatgtctttattctaccctcgacatttcattctatttggctgtgccctgagttacagtttgtaactcttttttatttggaattgtgattgtgtccctccatttccttctaatttccagagtttctgttgaaaagtctgatgccactctgattcctgattctttgtatatgacctgttttttccactctgaaaaattttagtaatctattttcctagggtcctgaaatttcacactggtgtcaaacttatttaattgttgtgtcacatgccagatataccctttgatatggtttggctctgtgtccccacccaaatctcatctccagctgttatcctcacctgttgagggaaggacttggtgggagataattggatcattgaggcagtttcccccatgctgctctcctgatagtgagtgagctctcttgagatctgatagttttataagggtctcttcccccttcattttctcttctctctcctgccaccatgtgaagaaggtccttgttttctcttagccttccaccatgattataagtttcctgaggtctccctagccatgtggaactgtgggtcgattaaacctctttcctttataaattatccagtctcaggtatttctttatagcagtgtgaaaattgactgatacagagaattagtactggaagtgaggcactgctataaagataacctggaaatgtggtagtgactttggagctgggttaacaggcagaggttgggacagtgtggagggctcagaagaagacagaaagttttgggaaagtttggaacttcctagagacttgttgaatggtttcgatcaaaatgttgacagtgatatggacaatgaagtcctgctgaggtagtctcagatggagataaggaacttattgggaactgaagcaaagttcactcttcttatgctttagcaaagagactggcagcattttgcccctgccctagagatctgtggaactttgaatttgagagagattatctgaaattggaacttatgtttaaaagggatgctctgcttcccccattttgggggaaggaattcaagccagctacagaaatttgcataagtaacaagaagccgaatgctaattgccaagacaatggggaaaatgtctccagggcatgtcagagatcttcacagcagcccctctcatcacagaccaagaggcctaggagaaaaaaatgcttcctgggccaggcctagggccctgcttcctcatcttcttctttttagagacaggatctcactctgtcacccaggctggagtgcagtggcacaaccatagctcactgtaactttgaactcctgggctcaggagatcctcccacctcagcctcctgggtagctgagactacaggtacacaccaccacacccacctaattttcttatttttgtagaggcaagggtctctctgtgttgccaaggctggtctcaaactcctggtctcaactgatcttcctattttggcttcccaaagtgctgggattccaggtgtgagccaccataacttctccattttctctatgctctttctgaaactcctattagttattgagcctcccagactgatcctctaattttcttgtcttttctttgctgttattttgttgtccttttttcccactttctggatattctcaacacttcttttgatttttaagatttttctgctcttatattcttaatttctaagaacgcttgttctccaaatgttctcttttttaaagactcctctgcatgttccaaggatgcaatctcttctctaaattcttgatggatttgatagtgtatgtcttctttttctctatgcactatctgtctcctgagtttctgtgtctttgattatttgttttggtgtctgccatgttattggctttcctcaattatttggtgatcatctgatttagactgagatgctaaagtgctacctggaaatgctgtctagagggacagtgcttgtcaaccagaatgctttatcatacagagtgatcagttgagaccctggcatctcacaggagaatcctcaaatgttaatatttatggatctttcctttcggggccagttactttctactttctccacagaaaagtcctccagtctcctgtctgagggtagaagcctggctaccagtgtcttaggaaacagctggaagaattactatgtagacatagaaatgaatgaatcaccaagtagacattcattgaaccttttaacctttaaccttctgctggggtgagggagagccagagtgaagaggaagctctttataaagactttcaaccaatcttgtttctggttctatcctgaccctccagcttcagaagtaactggatgcatccagttttgagcattacaagatttctgcagcatgaatcagctggcttcttattgttctctacccagcctgattttctgcagtccctaggtttgttaccagctgacctttgctttctaaaatcttgatttcattatttgtctactgttgcttcctctctaactctctgtgtgtgtgtatgtgtgcacacgcatgtgcttgcctgtgtatgcatctcaatctctctcatgcttggggcatagctttattattattttgttagctttactgttattaattctttactgctattttgttggaattctaaaaggaagagaagacaaatgcatgtgcttaatccaccatgtagatgggcatcttcccattgacaccttgtaactgattttcacctctactgtgtaccctccactatcctactggacatctcttatctcaaaggtcaccaataatctttaagtcactagtccaaatttattttggctcagctctcagtctcttagacatttagacaaccactgatacaatagaagacttcctcgcctgtgaaacctcatcctttttttttttttttttttttttttgagacagagtctcactctttcacccaggccggactgcagtggcgctatctcggctcactgcaagctccgcctcccaggttcacaccattctcctgcctcagcctcccaagtagctgggactacaggtgcccaccaccatgcctggctaattttttgtatttttagtagagacgaggtctcaccgtgttagccaggatggtcttgatctcctgatctcgtgatctgcccacatcggcctcccaaagtgctgggattacaggcgtgagccactgcgcccagccaaaacctcatcttttggctttcataaccttggtctcatctgtttattcttccacctgaacttatgttcctcagctcttctcttggtcctcttcaactcatgtgcccttttcttctcttttgatacattctttgggtagtctaatctacccttatggctccccttacccatctttatgtgatttctggcgttacttcttaaattctaacaggctacccaatgaactgaacattccaaaatcaaggtcttcctcaggcttggccctgcttcatctccctctcatcttcatcatgctgctcttcctcacgtactctacacattaacttggacctctctactcattccccataaatgtcccactcatcctgcctttattattttgtccaagctatctccttgacttttgttgttaaaattcattcataaatccaacatacatattatcgagcaccttttctctccatctttactgccattgccttcatctaggccagcaacttacaataattttagttacttgcctttttacttgtgttgtgtctcttttacatagtagaatgtatcagtctttttcaattttatactcctaagcatctagcacagggtcagacctatttgaagagtgaatgaattaatgaatgaacgagctctgatcccattaaccaggatagggaactacagaagcagaagcaagttttgaaggacaatgatgagttcatcttgggacatacttattttgaggtgcctgaaggaatctaggtggcaatatatagcaagtagttctctattttcccaaagagttctcatgagaaattagagctgaagatttctatttgcaaaccaataacacaaagaaaatagtgataaaatttctaatgaggtcatcaagaaagattgcttagagagaagagaagaaaaagctaagaagatgaagaacaaaacgctaaagaacaccaataggaaatgaatggggaaagaagcatccataatagagaagaggaagaaatggccagagagaaaggaaattttaatcaggaaaaatttgtgccatagaattctaaaagtaactggacacatccagttttgagcatccagtattgtagagagatcaagttggatgaagactaagtgatcattagattggaaaattgagtagtcattggatgtgaccaattggaagtgatgtgccctctcctccaatctgacggtgctttattggtgcctcttatgggatgaagcacaccgtatcctgggtatcctgtactggactcatctctactttcagactgcaagctccccaagggcaaacaccagtctggtgtgtctatatcatcagcaccagcacaggtacttgcaagttatttttaactttttattgaaatatcaaaaacctatagaagagtacacatatcataaaattcaatgtattttcatagtgaacacacacatataagacccagctcaagaaacagaatataactggcatcccaggaggtctctcatgaccccttccagttctatcattccacacaccaaggtatagattcatttttcattttatttggtttgttttactttacataaatagaataatatggcatgtactcatctgtgtgtcatttattgtactcagcatcttactaagtttgtaagattcatcagtagtgttgtatatagctgtaggccactcattctctttgctgtgaggtatagcatatttatccatcctactgttgataagcatgtgggtagtttccagttggggccattacaaatggccctcctttggccattgcagcatatatctttggtaaacatatattcccgtatgataaaactctaaaggtagaataaccaggtgaaaagtatgcatgtcttcaactgtagtcaatactgccaaagctttccaaagtgattacagcaatttgtatttccaccagcagaatatgacagtaacagttgctccacatcctctttcctctcctttcttcttgttctcttccttctttttaattgtagccattccatggctgtataatggcatctcaacttgattttaatttgtatgtccctgatgactcataaaattagagcacctctttacatgttcgtcggctgtttgaatgtcctcgcttgtaaggtgtctgtcaagatttgtccatttgtttattgagttatctgcctttttcttttgtattcttaaaagttatttatatattttggatatggatttgtcagatatatatattgcaaatatcttttcctactctttagattgctgttcagccttttgatgaggtatttttgttaaacaaaagttcttcattttaatatagtctaatttattgtttttcttttctatgaatgcttcttttcaggcctgcttaagaataagaaatctttgccttcgacaagtcataaagatcataaatatattctcccataagtgtcattgtttcacctttcccatttagatatgcactccacttagatttgcagatagatagatagatagatagatagatagatagatagatagatagatagataatacgaggtaggggttgggattattattattttttttttttttgcgacggagtcttgctctgtcacccaggctggagtgcagtggcactatctcacgtcactgcaagttccgcctcctgagttcacgccattctcctgcctcagcctcccgagtagctgggactacaggcacccgccaccacgcccagctaatttttagtgtttttagtagagatggagtttcaccatgctagccaggatggtctcgctgtcctgacctcgtgatctgcccgccttggcctcccaaagtgctgtgattacaggtgtaagccacggcgcctggccaagatatcattttttatatgaatatctaattgggcaattcattgaaaaggctttcttttgcccattacactgtagtgttgctttgtcatactcagatgaatgaatgtatgtgggtttgtttctggactctgccatgtttcattggtcaacaggtctatcctcacttatactttgctgtctcaattaccatagctttgtcacagctctcagtacctacggtagaagtcttccaactgtgttcttctttaagatagttgtgccaatttttttttttttttttttttgagatggagtctcgctcttgtcgcccgggctggagtgcagtggcgtgatctcggctcactgcaacctccgcctcccgggttcaagcgattctcctacctcagcctcctgagtagctgggattacaggcacccaccaccatgcccagctaatttttttgtacttttagtagagacagggtttcaccatgttggccaggctggtcttgaactcctgacctcaggtgatccacccacctcggcctcccaaagtgctgggagccaggcatgagccaccacactcagcctcgtgcctattcttgaccttttgcatttccatatgaattttagaagcagtttgccaatttcaccataaaacctgctgagattttcattggcattgcattgaatatatagattaatttttgaagggaatcaacacttttaaatactaggttttccaatccattaactcataaatccctgcatttactaagaatttctttaatttcttgaaaaaatgatttttcagtgcaaaacacttgcacatcttttgctagatttattcctacatatttgatgcttttaatgcctaatggctaattttaaaatgattccatgaatcaatgaaggttcactttttccccgtatctactgaaacagagtattgtgaaaatgaataatgatttctcttcttttttttgttttgagacagagtctcaccctgtcacccaggctggagtgcagtggcacgatctcggctcactgcaacctccacctccttggttcaagcgattctcctgcctcagcctcctgagtaaccgggactacagatgcatgccaccatgccccactaattttttgtatttttagtaaagacagggtttcaccatgttagccaggatggtctcaatctcctgaccttgtgatccgcccacgttggcctcccaaagtgctggaatcacaggcgtgagccaccatgcccgggcgccttctcatttttaacacctacctatttgcacaattatttagaacaggcctatctacagggtggtatcaatgtaagggtcaacctattaggagagcctaacatctaacattgctgacctgaatgaaggtttcatttactggaaattagaaaactacagtcctcagaccaggtttgatccataaacgtgtttgttcagctggcccagtgttataaataaattaagtcagttaccaacatttaaaacgtgaataaattcctgctttccagattttcttgaaaaaatcggacaatcaggcaacactgggctcatgttctttcttggaagcaatgggttgaaactgagtagcagcttcctccttagatggggcacacgttctccaggtccccacagtccctactaaaccctaatgccttacattcaatccctatgctacctgcttggtccctatagatagtcgagttggttacccctggttaatccctttttggcatttagccgacgttggttgtttgttttgttttatgtttatttttgttttgattatttaaggatactatctttttttttaaatgtgctttcctgagatctttgctaaagaacgctaccttttaaatactgttttaggcagggtgcggtggctcgtgcctgtaatcccagactttgggaggctgaggcgggcggaccacctgaggtcaggagttcaagaccagcctggccaacatgatgaaaccccgtctctaccaaaaatacaaaaattagccgggtgtgatggtgcacgcctgtaatcccagctactcaggaggctgaggcaggagaagcgctcgaacctggaaggcagagattgcagtgagctgagattgtgccactgtactctggcctgtgtgatggagcgagactctgtctcaagaaatttaagtaaatactgttttaagtaaggaattgtcaagagaaaatgactccttttaagactcaagtaaatgttcttctctagaaaaacttttccaatttttcacatctactccgccccgtctttgttcccctaccccagcacctatctggttatacacctgtcccttggtatcctcagaggatttgttccagagtccctgacagacaccaaaatccatggatgctcaagtcttttatacaaaatggtgtagtgttttcatataacctatgcacatcttcccatatactttccttttctctttcttttctttctctttctttctttctttctctctttcattcttcctttctttttctttcttttttttttttttatgaaacagggtcttggtatatcacccagggtggtctctaactcctgggcttacaggatcctactgcctcagccctccaagtagctgggactaacagcacatgctaccacacccagccagtatactttaaatcatcttcagattacttataatacctaatacaatgcaaatactatgtaaatagctgttgaactgtattgtttttatttgtattctttaattgttgtaatcttttattgtttttttttcctaagtattttggacctacaactggctgaacccatggatacaaagggctgactgtattctgatgattaatttttgtatctttatcctcttcaagttagaagcccctaaaaagcagagattctgatcattccctgtgatatgcctagtgtgtagtacatagatgcccatagatgctcaataactgtgcatcaaatcaacaaataaatgaatgatgggtggctgaaaatcaggctgggttaccttgtgtctatcttagggcagtgaacttaaacatagaacctggagaatacacatgattttctctaatattcaaaaataatatgttgccacatctgaacatgacactatagctaaactcaacagcctcatcctagcatgttcacgaatatgccaagcatgttgtcttacctagtttcttgttcacatcgctttgagattttcttgtggtcttttcaatttcatccacaagcctctggctttctgcgaccaggcgttctgatcgggacctttgagcgtctgctctgtggtactggttcttgttagcaatgtgccactctgagggcaggaacttgggtggaggttgtaatagtttagccatttgaggtttccaaattcctgatcaaaagcagactcttttagattaaatgaaagcaatttgtccttttttatgataatttttattcaaggatgacatatatacggaaaattgcataaatcataatctgtacacaaaataaatctatctgtgtagccggcacccaaaccaagaaacaagcattaccagcatctctaacctcctcccagttactccacctcaagcccctcagggtaaccagtatcctgacttttaacactacaaattcgttttgctgtttttgaatttaacataaatggaataatacagtatgtattattctgtctctgacttctttagctcaacattatgtttgtaaaattcatccatattgtctatatgattgcagtttgttcgttctcgttgctgtgtaggtgccgttatatgaataaaatctagctgtcttttctactgtttatggatatttgggttgtttacactccagggccataatgagaatgctattaatagtctcatacatgtcttttggtgaacacgtgtatgcatttttataactcattagaattgttgggtcatggagtaatgttctgccaaacagatgagcccagagatgttttcttaaaaaaagaagaagaaaaagaagaggaagaagaaggaggaggaggaggaggaggaggaggaaatgtaacatgtgtaaactgacaactgggtattgaacttgttcaacacataaaagaatctgaaaacttccaggacaaagaaaaggagagaacaggaaggggaacaacacaggggaagccagctggcagaggctgtcggcagtggaaacgctaaaattacccatttcatcttcatacaactctgatggaccatgagaactgccttcctcagacagggctgaaatctgcccccactcccatctctaccctaaggtctgagtccctgctcttaggggcctctggatctctgaagccttcacatatataaggatgaaactagagtcagatcttgactaggctgagaacctcagcccacccagccccctcagacaacatggagtttctccgtttcttcctagcccagtcccttttatggcttctaccgaatttatctgagtgtggagcccagcatttaacccaaggctcctggataagtctgaatagcccccagagaggtggggacctaaattagggctcatcccaacgtcataaggatttggttaggcggggagggttgcgggtaggggtcggtggggtggggtcatggtttacttacctcagcgccacacagaaccactacgcaagctcgggatgggagcctccttaccccaactggagcttccagctcttgcagaacagagaggtaaacaacgcggtctccatgacaacaagtgacgcgttgccagggcaaagagggctggttccgccactgagcagcctggccaaaggcttagcgcaggcgcaaattctgcggaccccagagccagagacccaggagtgtggcgtgtgggaagggtagggccagatgctccggccacctcaacctaccgcgaagacgcggggcaccaagcagaagacagcggccaaagccccgagctgggagtcaggagacctgcgtctagtccgagccctcccgcgggcgggatcatctcgggtcgcgctgtaccccggctctcagacttcccggctgtacagtggggttgggctgggcgatgcctccaggacctcgcagtcgcaggcgaaattgagggttaaaaatcaggaagccaagttgattgtttctgtaagctacaatgagtttcctccagagtttgtataggtctgttaccacaactggcttatttctgcgtggggcgcccgatggggcactctgtgagggcaggtgtgtgagtagaacgccttcaggcaaacactccagaagtcactctgcatccactaggagatggaaaatatgggagaaaaattaaatctgaggggatagctccagaagatttaatatttgtcaagtaggacttccagaaggaaagaaaaaaagagagagaatggcaaaacaattgtgaaagtgagagagagataacttgagccaaagactcaagtctttagattaacgacccacctgaaattaacacacacccccattccttacatatagtcctccctgtggattatgcatataatccatagagtgattagctccaggatccccctcagatactgaaatctgcagattctcaagtctcatataaagtggtgtagcatttgtatataacctacgcacatccctagataggcatactttacgtcatctctagattgctacaatacctaatacaatgcctaatacaatacctaatatagtgcctaatacagtgcctaatgcaatacataatacaatacataatacaacacctaatacctaatataatacctaatacaatgcctaatacaatacctaatacaatgtctaaccatgcctactcatcgcttcattcgcatggattcaacatagcactcagggtgcaacaaattcaagttttgctttttggagctttgtggaatttttttcctgaatattttttatttgtgtgtcatcgcatccaaggatgtagaatccacggataggaagggccaactttatacctattctggtggaatttcttaattcaaagaataagaagaaaaagaaagaataggtatcaagtgtttcgtctctaacacaggtggctagaaatgatggttgctagaaatgatgctaggataatgccttcaaattctatagaaaattatttcaaatctgggattctacaaccagtcaaagcatttcatgtatgagagcaaaataaaagatttctttggacatgccagtactcaaaacggtgagcgtacattctttatggaaaaaaataatagagcaaaagtgaaaaatccagaaagaagaagatactggacataagacatagtggaaccaacccagctgtgtgatgaaaagaaagctcggtgtaatagctaccgaactaaaaagcaatgagtccaaattacaactaaaagtcaaaagaagttttgaacaatatctttaagaagagttatacaaactatgattcataacccagaagtataaccacatggtgagttgaaattatgtctcttctgagcaataaaaagtagataaatgatgacagtctccgtgatgcatgcctgaggtgccatcacttggaatgcctgggaggtatggcttgagctcaggagtttgagactgcagtgagctatgatcacaccattgcactccaacctgggtgacacagacccctattaaaatattttttaatttttataagttaaaaatagacaaatacaaattctgagaaaagttaaaagctgcacaagggctgggcatggtggctcacacctgtaatcttggcactttgggaggccaaggcgggaggattgcttgagctcagaagttcaagaccagattgggcaacatggtgagaccgtgtatctaaaaaaataaaaataaataaaaaacctacagaagaaagttataagtatgaagaaaattaaattttgatgtcattttcagagtagtatatgaaatacaagagatggtgccaaaagtcaccaccccctcatgatcatccctgctgaactcattcattctctgaactcattcattctctgaactcattcattctctgaactcattcattgatttgttcaacaaagatttgttgaccactctctgaactcattctctgaattcactcattcattaatttgtccacatacctattgaacatctatgaagtatcaagacctgtgctagacaccaaggatagatgaagataaaacacagtctctgccttctgtggagattacagatgcacagctattgacacagcaattcaattccacatctagggatttatcctacagatacatctgcacatgtgcaaaatgatgtaactgtgtgtaaaaagttattcattgcaaaattgttcttaatagaaaaaaatttacatatcccaaatgtccaccaagaggagactgattaaataaattatgaaacagtcatagagtattttttactgtaaaatatataattagaaatcttttttacatctctttgatatggagtgaccaacgagatatattaaatgaaaaaagcaaggttcagaagaattacatatatagtattttaccattgttatgatagaaaatggtaaaatgtaattgtttgtgtacccctagaatttctccagacagatacataagaaactggtaacactggttgcctctggaaagagaactggatggctggggtgtggagggtaaaggaggcttcactgaataatcttttgccttttgagagttgtacaattattatctcttttaaaagaatataaaaatgcagaaactctttataataaatgatttcagtaaatgaatgacacaaatacggcagccgatagaagagcaggaggtgtgaaagcgttgagacagagctaactagttattttgaaaccagaagaattcagagggagatgaacagaggcagtatgtctaggagacgacacacttagccaggggcctgaagactggcttccagcctggatctcaccacggacaagcctcaggtttcccatcctcgataaatctgtcatgctatcctgagtattttatggatgcaaaagtgctacccaaacatcagatcttattcacttcttatttaactgtcatacagtggccactgtgacccttgacctctgttttggtagcattgccagtagtattgggatctgtgtcaacttccccactgaactgcacctagattggggggaaaagactcccttcatataatggtattggtaagatgtgaattgttttccatcttaggtttcactgtggagcagtgagttcattgataagaaaccactagccctttattcttgctattccttataataagtatcaatatcacaggccattgtgcgaagctgggcattcaagaccctagtgttctgcgtctgtagcggggacttagtcccctgttgtatgacgctaaccccaaattagcaattaacaaacatgataacttaaaagcttttcattggaattttaacctaccaaataactgtgatgtgcttttaagaggcccttaggggaataaaaggatataaagcatgtgcttcccctttgaaataacagattttcactgccagtaaggatgaagagatgttctccaccatctttctttcaggtgttcacagcaaatcaacaaggaataaaaaaatgggaaagattcataagacactgatcaattacaggactgtatggcacacaccaggatgtcccggcacagttcacaagcaaggctccattcagggtccccatttctcatttctagaaggtggcttttctctgtaattgacaccacagtacaaaataaatcaaaatcctgaggctagaaacaagatagtcaagaatatgtgcaacatgtattgatttctagaagtcgtcacgatattttaaagtagcttcttgtatagaattaagtggtgaaatgcttcctgtttctcgaatgatcaccacaaccaccatttatcaagcatgtattatgtgccaggcactgtgcttgggagatattatcccatttaatctacacacagccctttaggagagctatgattaatgacccaattttttagaagacaggaggcacaaagaagttacttacagctactaaatggttaaaaaaaaggagggggcggattttaattacctgaccctagagcctgcaatgctaaccactatacccattgtcggagcactatattgactcacacgctcctaagagacaggttagtccttttcaaggtagtgcataatgatcttttcaatgtgtaacgttggaggcttgactagacctttcttaagtcttgttcctatttgcctccaggagtttgagcaaagtggccatttcctgcccttcatcacttgctgtatggttctccttaaagaaaaaccagccatgtgggtgatcctttgagcaccccatctgcctccacgggctctcctgtaagcttcttcacccagccaacaaggtcctgagcagaagccttgtttccaggctgtctcctacgtctggaagtctgggctcttgaatcacaacaggatcttgactgctttggcaatttgaatttgaggatgatgagcagtgcctcatctcaaaaaattactggagtaacttttatgaaactattttgttttcagggtctaaggtttttgctttggagacactcagggaatatgtatctactcgttcaggcttagaaggcttgctcttggctgctttgtaggcaaccaaaccaaatgttgaacatattcagggttttaccaagtactccaaaaacaagaccaaatataatcaaaagtaagcaagaaagaaatggtgagatggctttaaaatgacacctgcatgcacaatgttattcatttcagcatcgctggtaataggaaaagactagaagcaacttacatgcccatcagtaggtgtcttgctaaacaaattatggcacatccttaccattggaaaccatgaagctacaaaagaatgaggaaggaccttttgtagccaaacgaaatgacctctaaaggataattttcagtgaaaaacaataaaaaatcaatgtgatcctcctgcctcagcctcctgagtagctgaagcagaaaggttgatattatctattttgtcctcaaaaatatttctataaataagaggggaggaagaaaacatatatacatatttgcttgtaaatgcataaatatttctggaaggatacacaagaaactggtgaccttggctgactgtgaagcaaactaggtgtccagggagagtggtagaaggagacttttcactgaatacccttttgtgtcttttacactttgaaccatacacatgtatgtactacctttgcaaaaataataattgaattttattttattattattaaaattagttctagaccagtattgataagtaggaacaagatagaaagtcttataacaaataagacaaagggctagaatatttcagttacagtgataggctatgaaccgggtcaggactagccagttaaaagagtcactacatttggtcatttgctgtaaagaaagccgaaatcaaatcggtgctttggtaaagccattacataacctacatttggattaattccagttcctaaccattgtttcttcttgcagtgaggccccagaagtaattcaggcagaataatgaatagaaatttcgtagttttcctgaataatagtagttgagtgcctatatatcagaaagtgtttgcattatttatccatcatttaacaagtcccttcttaagctctgctccctgcatctcacagtgctaggtgctttggggtaggtagcatgggatcagcctctggtatcagacccaagttcaagtccagttcaggcttatactacttgcaggatttgtttcccttgttttttgtttgtttgtccatttgtttgggggatgtttagttttatttatttatttgccagggtcttgctctgttgttgcccaggctgaatgcagtggcagcaatcgtggctcactgcagcctccaactcctgggctcaagtgatcttcccacctctgcctcttgagtagctgggactacaggcacatggccacctgccaccatgcctggctctttctttcttttctttctttcttttttttgtagagtcacagtctcctatgttgtccacactggtgtcaaactcctggtctcaagcgatcctctggcttcagtctcccaaagtgctaggattacaggtatgaacaactatgcccagccccagctgtgtgatgttgggcaaactgcttgtctctctgcatctcagtttcctcatctgtgacaaatgaacacaatatctaccacatagggcactataaagattaaatgaaatcatgtatgtgtattagtccagtttcatactgctataaagaactgcccgagactgggtaatttacgaaggaaagaggtttaatcgactcacggttcagcatggctagggaggcctcaggaaacttacagccatggcagaaggcaagaaggaagctagacaccttcacaaggcagcaggaagaagaagtgcagagagaaggaagagcctctaataaaaccatcagatcttggccgagcacggtggctcacgcctgtaatcccagcactttgggaggccaaggcgggtggatcacctgaggtcaggagtttgagaccaggctgaccaacatggtgaaacaccgtctctactaaaaatacaaaaattagccgggcatagtggtagacacctgtaatcccagctactcaggaggctgaagtaggagaatcacttgaacctgggaggtggaggttgcagtgagccgagattgcaccaccgcactccagcctgggtgacagagcaagactccgtctcaaaaacaaaaaaaaaaaaatcagatcttgtgagaactcactcgctatcactcacaatcactatcagaacaacatggggaaacgatccccaagattcaattacctccaccatattgatactaaccatatcagtaggcaaattgcaacagatgctcaatacgtattttctgtccttcctttctctttaaggttcttggtgtcttaacatactcagggatatttatttacaaggcagcatattataacaaataagtgataaaaacagcgtatatcacaggattgtagttcctaactagcagttcatatcaatagcaaacaaaaaccttcttataaagttcttcttagacctgctcactcagtcattgaaggtagggctagggcataaaaattcaatatgtatctatttcctgttaaatcagtaatacacactgagaattaaaattttaaatataaaagggaatacagtgagaagtaaatctccttcccattcctattcctctggctcctttttccctccaaaaggcattcattttgtccaaagatatgtctcattattttttttctaatctttgttctatgtgttcttcaaattggataagttctatgtttctgtcttcaagcttgctgacttcttttggtcgttttcatcctgctataagcccatccagtgaatttaatattttagatatcatatgtttttagttctagaatgcaaccatttggttgtgttttggtagtttctatttctctgatgaaatttcctatttttcattcctcctgaacatatttccatttatatccagttcttatctcatgagctatttcccctaatcacagactaaaaatatatattttttcccttccatttaattcttagatggattccctgtctagagaatgaagaatttagattcagtgatcatcacagaaataaaattgttacaatcttttaaaatccttttattcaccttgaaagcaatttgggattttggactttaaaaataatatttcacttgaaaactgtctcaagcatctaatgtaaatgaaaacagcaggaattctgctaagtgatttgaagaaagacatcaaaacacactgacttttgcacatatatttttaattgagacagagtcttcctctgttgcctaggctgagcgcagcagtgaaaacatggctcactgcagccttgacctcctggctcaagcaattctcccacctcagcctcttgagtagctgggaccacaggcacatgacaccacatcttgctaatttttaaattttttatagggacagtgttccactatgttgcccagcctggtcttgaaatcctgggttcaagtgatcctcctgccttagcctcccaaagtgctgggattccatgcatgagccacctcacctagcttgcctatttttaattgggaatttttgggctctctctccagtgcctcattatgtaaggtatataacttgcagggcatgacctcagggaactttctagttgcctgaactttctaatggcgacaactaggacaccagaacacttttgccacctgtcctactgttgctagaataatgttggcccttgagttcatagacaaagagaaagcagttctctcctggccactcaggggcagaaaaagcatccccactcctctgcattaggagaaaacacattttctatgcatgaaagaaaaggaagcagaacttctgttaaaatgatgcccaggaaaaaactttttttttttttgaaattaactattctatcttatattagtcaataaggaagtgtataatatataatcaatatatattatattcactgaaaattgctttaaagatggtgctaagccaatactgagaagagtgcctgtaacaaaataggcactcagtaatcttttttaaaattcacaagcaaaaaaaatatacatatatatatatggttaaactggatttcatttcccatacaaataccagaagcttccaagaaaagtatattttgagagttttttttttcttgaagggcattatttttcatataaagtttgtgttgaacaaactttgttacaaagaacaattctatgctatggcagagtatgtttgcacattgcagttgtcttttttctttatgatgaaattatcaaacacattaataagatctgaaggtccagttttcaagaaaggaagatagtcatggatgctggtgtaagccttctagaaaattttcaggcctttagaaaaatttgaacaactgcctgatcccttgagtcgtgaaaggtattttaaaattagtattacggccaggtgcagtggctcacgcctgtaatcccagcactttgggaggccgaagtgggcggatcactaggtcaggagatcaagaccaatctggctaacatggtgaaaccccgtctctactaaaaataaaaaaaattagccgcgcctggtggcagacgcctgtagtcccagctactcgggaggatgaggcaggagaatgtcgtgaacccggaggcggagcttgcagtgagccgagatcgcgccactgaactccagcctgggtgacagagcaagactctgtcccaaaaacacaactaaaaaataaaaataaaaataaaattagtattacatagtaaaaattatgtgttaattattgttaatagtcttcagtgttaattatggacttactaattgcataaatcatgactattccttaatgttttatttcaaagtagagtttaggatgctaaacatatgtttattgtttgcaaatacctatgtgctggcatttatgtgagccaagcaaagtctgattgggccaaaccctgggaaatgtaaatatatttattcttattttactatttggcaaagtctcctgataattgtaataatgtctgctattgaatcgtggcagacaccatccagtgtttctcggaatacaggcagccctcctacactctgcatcagagcccctcccgcaggcgatgcttgttaaaggatggattcgcaggacccgccgctgaatcagaacttaagtttaaaaaaggctgcaccttcacgggtgctcgctctgtcctaccagtgagcttccctttagtttcgcgtttccacaggaaacaggacatagatctaaaattgcctttgcacttggactggtttcctttgctgacctaatacagaatagctttttgtgctgtgactgcgagtgtgttgaacagatcctctgtattttaggagaagaaatttggtgcctcgttgctcaccatcaccactggccctggtagctctgcggataaaccagcttggatttcacccttgaggattaacattgcaacactgcataggcacataaagccacctgaaagtcaagatgaggcaggtaatgtgcactgggatctcatgtggttggtgtcttgtcttttgccatttgtcaagcacagcagctgaggttgctgaagcaggtgactttcaagagccgaacccactgcaagaagctctcctggaaaggggcatcaaggctgctgaccctcctcctgcccctccgctgaccaactccacacctgggattagaggggaggaaacctttatcccatactctcttatgttctattcctggggacctgcaaattaagctgataaaacacagattaacaaaggaaaaataatacaattttaattgatattaatatttttatgtgcacaggagcttcacaaagagaagtagaaactcaaatacgtggttagatgtgagaaattatatactactttcacaaagggtgataaattatggataagtgactggacaaaggaaagaatgtttgggcttctggggttataaattgtgagaaagtgcttaggaatatatgggagaaaataatagaagattaaagttatctccataaggttggtttatgcagattcttctgaatgcaactcccatcaccagtgataagagtcactctttttcttccgggtatagaggggcatcttcctcaaagcaaaatttaggtcctgcatttaggcagataagggaaggcagagaacttttactgcatttgttgtttcttccttgcctatagctcaaaatattcttctgccaaggtagcatattttgggggtggcatattctgatcctctttaggatcatcagcacctccagctggggtgaggctggatgggggctggcacaaaggaggctttcaggcagtttccttgagttctaaccgcaacccctgcagaacaattggcctgtggcctgtggcctgctctccccactatgcctgaattgctgtggactagtttatgaatagccctctgaacccagaggaagctcgaggaacagaattgacatacccatcagctagaatcgctgtaggaagacagaatcagtgaacataaagtatccaagttcaaacaattgaaaatgaaataataattaatttttaaaagagctttgtgaaatatgtggataaagcatactttccgatgagcctaatactatgaatgataaattataaacgggagtcctattttaaatctaagcaaggattttaactcaaggaaatcaatatgttccacaagagggcagtatggtaactcgtttataaaacagtaggctcagaagagccaaggacgtttgtgatcagtttttaaatttgtgataagaactgctttgagcagaaacaaaaatcaaacaccatttttaccgtaaagagtttttctacatgacatgaaagctactcaaaaagattggggagttttttaagtgtgaatgacatacttttgaaaaagtaagctcctggacttggaactatacagaattgctttcattagttgctatgttgctcggttgctatgtggtctagtaaaagctacagacaaaatcaaggaaatcacatttcctctgattcctcacctcaagttgtgcctgacaaagtttgtgggagagtctaaattgggaaagatagtgatccttacagctagctttatctgaactctgagtagcaggctgggcgctttacgtggattatttctttcagccccatcgtagctctatgagttaggaactattattatcttcatttgatagacgaggaaaccaaggcccatagaggactgaatgcttgcccatgggacatggctcatgcagagttgggattcaaatcgggcacatcaaatctagatcccaagtttgagctatttctaggcaattagtagcaaagacagaactagaacccatatctctttgttacgaattaaagggtgactttaatgttgaaaacgatgtgtatggcgggactgagtagaagaaacctttggaggagggctgatgggccagacaaaaagtgactgtgtttgcaaaaagacaggttcatgccaagaaacgagaacattcctgtctgagctgggatcccccatttatgccgattatgcagtgtcagggttgtcaagagcagagggatttccccattctcttctcaaactccaaagagctctgagatccacaggctggtggggttcccaggagaagcctgcagaaggtgcttcctccttcagggcacagaagaggacgaagagaagttcacctaaatccccagagcccttagtcaagttcatcccaaaactatccgaataatcatgactgctatcccttgagaactcaaatgccaggccctgtgctaagcattttacttgtgttagctcatttagtcctcatagcaattcaatgaggtggggcttatgttcaccatctgggaatttcacaggctggcccctctcacaggagtttcatcatgtaaggcctgcgtacatatatgcatgagaaagcatgtcttgtacacaaattggttttcctaaaccctccctcatctttgagcaatgcagccgattttgtttttaaaatgcagcccacttctgagtaagcatggcagattgctcacttcccccttccaaaactccactgaaatggcaataaaggaatcaagaatatataaactcataaggtgataaaatgagggaagagatgaacatggatgagagagtcccacaaatatctggaagagggagaggagcaggagctgacttggcagagctggggatcactacctggctccctgcagatgaggaaactaataagcagaagcgaggtggtcttatagaactctaggtgctgaggacggggagatccaaatctacagaaggtgggcataaggcatgggactaaaaacaggggggctaagtggcctgtatagggggaggatggacccccttcctcctcctacagcaggcgcaccccagctgtctccacccacccattgcacgcctccccaccctcactgccagcaggaggtttgacacattctctctggataactgaatggctcctgagaaaagacccccacattctgacatcttggagtcccgccccagtttaaaagccagtttgctgtccagcgaccttgttgtaagtccttctgtggacaagcctcacctactccctcagagttctcattcatctttttagtgagtcacacttagacagaaacaggcagcccaggatctccaaatgtttaaagacagcctccaacttggaagaaagaaatccaaacaaataggaaaaaggaacttggagaaagcagaaatgatggaagacgtagaaaaaaatgtgaaaataaaaatttgataagcaatttcttcagaaaaataaaataaggtgttatatccattaatcaagagttagattctttttttatgtactttaagttctggggtacatgtgcaggtttgttacataggtatacacgtgccatgaagttttgctgcacccaccaacccatcatctactttaggtatttgtcctaatgctctccctccccttgcgccccatcccctgacaggccccagtgtgtgatgttcttcctccctgtgtctgtccatgtgttctcattgttcaactcccacttatgagtgagaacatgcggtgtttggttttctgttcctgtgttagtttgctgagaatgatggtttccagcttcatccatgtccctgcaaagtacatgaactcattctttttatggctgcacagtatttcatggtgtatatgtgccacattttctttatccagtctatcattgataggcatttgggttggttccaagtctttggtattgtgactagtgctgcaataaacatatacgtgcatgtgtctttatagtagaatgatttataatcctttgggtatatacccagtaatgggattgctgggtcaaatggtatttttggatctagatccttgaggaatcgccacactgtcttccacagtggttgaactagtttacactcccactaacagtgtaaaatgttcctatttctccacatcctctccagcatctgttgtttcctggcttttcaatgatcgccattctaactgacgtgagatggtatctcattgtggttttgacttgcatttctctaacgaccagtgatgatgagctttttttcgtgtttgttggctgcataaatattttctcttgagaagcgtctgttcatatccttcacccactttttgatagggttgtttttttcttgtaaatttgtttaagttccttgtagattctggatattagccctttgtcagatgggtagcttgcaaaaattttctcccattctgtaggttgtctgttcattctgatcatagtttctcttgctgggcagaagctctttagtttaattagatcccatttgtcaattttggcttgcgttgccattttttttggtgttttagtcatgaagtctttgcccatgcctatgtcctgaatggtattgcctaggttttcttctagggtttgtatggttttaggtcttccgttaaagtctttaatccatcttgagttaatttttgtataacatgtaaggaaggtgtccagtttcagttttccacatatagctagccagttttcccaacaccatttattaaataggaaatcctttccccactgcttgtttttgtcaggtttgtcaaagatcagatggttgtagatgtgtggtgttatttctgaggcctctgttctgttccattggcctgtaatcccagcactctgggcggccgaggtgggcggatcacgaggtcaggatatcgacatcatcctggctaacatagtgaaaccccatctctactaaaaatacaaaaaattatccaggcatcgtggcaggtgctactcgggaagctgaggcaggagaatggcgtgaacccaggaggtggagcttgcagtgagccgagatcgcaccactgcactccagcctgggctacagagcgagactccgtctcaaaaaaaaaaaaattgttatgtgtgaatttgatcctctcattatgatgctaactggttattttgcccgttagttgatgcaatttcttcatagtgtcgatggtctttacaatttggtatgtttttgcagttgctgctactggttgttcctttccatgtttagtgcttccttcaggagctcttgtaaggcaggcctggtggtgacataatttctcagcatttgcttgtctgtaaaggattttatttctcctttgcttatgaagcttagtttggctggatatgaaattctgggttgaaaattcttctctttaagaatgttgaatattggcacccactctcttctgacttgtagggtttctctagagagatccgctgttagtctgatgggcttacctttgtgggtaactggacatttctctctggctgcccttaacatttttcctttatctcaaccttggtgaatctgatgattatgtgtcttggagttgctcttcttgaggagtatctttgtggtgttctctgtatttcctgtatttgaatgtggcctgtcttgctagtttggggaagttctcttggataatatcctgaagagtattttccaatttggttccattctcccttcactttcaggtacaccagtcaaatgtaagtttggtcttttcacatagtcccatatttcttgaaggctttgttcgttccttttcattcttttttctctaatcttgtcttcacgttttatttcattaagttgatcttcaatctctgatatcctttcttccacttgattgattcggctattgatacttgtgtatgcttcacgaagttctcatgctgtgtttctcagctccattgggtcacttatgttcttctctaaactggttattccacttagcaattcatctaaccttttttcaagattcttagcttccttgcattggattagaacatgctcctttagcttggaggagtttgttattacccaccttctgaagcctatttctgtcaatttgtcaaactcattctccatccagttttgttcccttgctggcaaggagttgtgatcctttggaggagaagaggcgttctggcctttgcaatttttagcctttttgcactggcttctccccatcttcatggattgatctacctttggtctttgatgttggtgacttttggatggggttttggtgtggacgtcctttttgttgatgtttatactattcctttctgtttgtttgttttccttctgacagtcagggccctcttctacaggtctgctggagtttgctggaggtccactccagaccctgtttgcctgggtatcaccagcagaggctgcagaacagcaaagattgctgcctgctccttcctctggaagcttaatcccagagggaaacctgccagatgccagccggagctcccctgtatgaggtgtctgtcaacccctgctgggagatgtctcccagtcaggaggcatgggggtcagggacccacttgaagaggcagtctgtcccttagcagagctctagtgctgtgctgggagattcactggtctcttcagagccggcaggcaggaacatttaagtctgctaaagctgtgcccacagctgccccttccccaaggtgctctgtcccagggagatgggagttttatctataagcccctgactggagctgctgcctttctttcagtgatgccctgcccagagaggaggaaactagagaggcagtctggctacagcggctttgttgcactgtggcgggctctgcccagtccaaacttcctggtggctttgtttacactgtgaggggaaaaccgcctactcaagcctcagtaatggcagatgcccctccccataccaagctcgagcatctcaggttgacttcagactgctgtgctggcagcaagagtttcaagccagtggatcttagcttgctggtctccaggggggtgggactcgctgagcaagaccaccttggctcccttgcttcagccccctttccaggggagtgaaaggttctgtctcactggggttccaggtgccactggggtacaacaacaacaacaaaaaactcctgcagctagctcagtgtctgcccaaatggccacccacttttatgcttgaaacccagggcccttgtggtgtaggcacctgagagaatctcctggtctgctggttgcaaaaaccgtgggaaaagcatagtatctgggctgaatagtacagtccttcatggcacagtccctcatggcttcccttggctacgggagggagttcctgaccccttgcacttcccaggtgagacgacgccccaccctgcttctgctcacccttcgtgagctgcacccactgtctaaccagtcccaatgagatgaactgggtacctcagttggaaatgcaaaaatcacccatcttcctcataggtctcgctgggagccgcagaccggagctgttcctatttggctatcttgccaagttccccctcattttcttgaattacagcttttagtattctttctgatcctttgctttggtttttgttcatctttccgttgtgcttttgttttgtgtaatgatattattttgccctttattgtctcttttcttatagtaactttgtatgggatttgacttcactacttttctactgccatttttatgtgaattttgttttccatgttaataaaaagaagcttgttcagataacacatctaacttcttggatccccatccatttttgttcttgtaatgttcaaaaacatgatggcctgcttttggagatttcctggctttgtttccccaccctgtgcttttctggatcttttctttcatttatttcagttgagtttttccaagggtttctctgaagtgttccgctccatcctggaagacagccttggctgaccagtttcaggagttcccgtaggtccttagatcttatcaactgtgcctggcacctacttgctattacagtggtgataggctttggatctgtgtcccctctaaatatcatatcaaactataatccctattgttggaggtagggcctggtgggaggtgactggattgtcgaggagatttctcatgaatggtttatcaccatctccttggtgctgttctcgcgctagtgggtgacttctcctgacatctggtcgtttaaaagtatgcgacactgttttagtctgttcttgcattgctataaagaaatacctgagactgggtaatttataaagaaaaaatatttaattggctcatggttccacaggctgaacaggaagtatgatgctggcatctacttggcttctgggaggcctcaggaaacaaaatcatgatggaaggtggagggagagccacatggctggagccagaggaagagagagagaggggagaggtgccacacactttaaagcaaccagatctcatgagaactctatcataagaacagtaccaacggatagtgctaaaccattcacgaaggatccacccgcatgagccaatcacctccaaccaggtcccatttctgacatttgaaaattacaacttgacacaagatttaggtggggacacagatccgaaccatatcaggcaccttctccccctcttccttgctcctgccttcaggatatgatgtgcctgctccccctttgcctttttccatgattggaagcttcctgaggccttcccagaggcagaagccactatgtttcctgtacagccggtagaaccatgagccaattaaacctcttttcttgtaaatgagccagtctcaggtatttctttacagcagtgcgagaatggcctaaaacaaatgggcatgttccctcctagttccagctgttgttcccaaattggcctactacaattttaccattttcaggtttgtcatatgtcctgttgttttcttccaagttctcttgcacaggtgagatgtggataacacataggtcttatggctgttggtggtttgtcctgttttggagtttgcagggattacttgtctagctttttgtaaatgtgattcatgagtatttgattttgctatctagttctgtctgtttttatgtggatatccaggaagatccaaattctatgctgcctccactgaaactgtcttcccagaaatgtattactttttgtcattaaaaaggaggtataggaagattaatctatgcactgcatttggaaaggtgtttgtttgtttgttgtttatttttaggttgcagtgatggcagggagccaatgttgatttctgatatgggaggatgatgatcagagctggtcatctgaaagattaacttggcagaagtttgaagattgaagaaaagtagtggagtgagaaggccaattctgacagtacatcagcagtccaaataggagatgataatgagggaaaggtgagtgggaagggcaaggaaaagacagctgtggggaattcaataaacgctgaatcagtggcttggtggtgagggaaggatgaagaagagttagaagaatcagaattgactgaaaatttgtaggatgaatgtctaggggaataatattacccaaaacaccagtgtagatgaggaaaatgatatggtgacagtaataatgaggggtcagagggagagcagtgactaattttttttttttaatttgcatttcactagctggaggtacctcaagaaaaagatgttgtgtgtgaatgtgcagggctgagggaaaggtccatgctagacacacagatttgagagtcatctgcaaagtatactccaggaaagatagaacaaatggcactatatatccacagaaaacttagaaacactattcctgaaataaagattgcctttgctcattgaaaatgttcacagtgtttcaagttaacaactagtaaaggaccaagagcaagaactatcctcaggaaaatactggctataaaaagaaagacctgaagctctatgtgtacaagtggtgcttgtaaatttttctgagtagtctggtggtgattattggggcatccccagatattgatatttggagatattttctctggggcaattcagaatttttttttttttttttttcgagttggagtctcgatctgtcgcccaggctggagtgcagctgcgagatctctactcaccacaagctccgcctcccgggttcacgccattctcctgcctcagcctcccaggtggctgggattacaggcgcgcccgccaccacgcccggctaatttttttgtatttttagtagaggcggggtttcaccatgttagccgggatggtctcgatctcctgaccttgtgatccgcccacctcagcctcccaaagtgctgggattacgccaccatgcccggcccagaatttttttttaatagattattcttccaattgcctgaattcagaacaacacctggctcctgatgttctaggggcagggagcgggaaaaaggatggggcttcactgttcattttgcagactttgacgttatccccattttacgttatcccccaatcgaactgatctctgtacctaatgctctaagttcagaccctcttcatttcagtttctccagagaataaaactctagggtcttgacaaaggtgtatcttccgtgcaaggtggggtatgtgggttgggcattgttccatatatagacttttagccagtcctggtatttctcactttcatgtattctaggaaacgggtaactccaaggcttggatctttggggggttctctgagagctctttgtcttggtacttactggtattccccctcaacgcattttagggtatagcttctaataagtaaagctggaatccatttctccatctgtgttagtctgttttgcattactattaatataaaggaatacctgaggctgggtaatttataaagaaaagaggggcctcccactttgggaggctgaggcgggcggatcatgaggtcaagagactgagaccatcctggccaacatggtgaaactcgtctctactaaaaataaaaaaattagctgggcgtggtggcacgtgcctgtagtcccagctactccggaggccgaggcaggagaatcacttggacctgggaggcggaggttgcagtgagcccagatcgcatcactgcactgcagcctggctaccgagcgagactccatctcaaaaaaaaaaagaaaaaaagaagagaggtttgtttggctcatgattctgcagactgtacaagaagcatgtcactagtatctatgtctgataggggactcaggaaggttctactcatgttgaagggtgaaggggaagcaggcatgtcacacggtgagaaagtgagctagagagatgccaggctcttttaaacaaccagcccagctctcacgtgacgtaatagaacaagaactcactaattaccaacgggaaggcaccaaaccattgaggagggatttgtcctcattacccaaacacttcccaccgggcctcaccttgaacgctggagatcaaattttaacatggtatttggtggggacaaaccctatcagcagctgcttttaatatttaaaaaaatattttgagagagggcccacagaccctctgaaagaagcagactgctcctgcaggacccgggggacaccccaaatactgtgagtgccccaactgcggaagtgggaaagggagaccctcctttccggaacacacaccccctactggagaagctgaaggtctgcttccgggagatgctcccgacttcacctggagctgagtcaagttagagaaccggaccaagcgaaatacaggggcagaggaggcagcagggaggccctgggagctctttgaatccccaggtagcctattcctgcctggcaccactgggattcatcaggagggaggccagaggagcaggaggtaaaaccctaccgggagaaggacttccctagctgaattttgtaacaatttgagtggggcgagaagcctcctggccggaacttgggggaggatgcggatctggcttgcagacttcacaggtgggggaagaactaaagcccttttctttcacaggtgggaggcggaaagcctcgggcaagttttcaagcccgtcctctgtctggaaacagactcagaggtgttgcaggggacacggtgggagtgagaccagcccttcggtgtgcgtgggatctgggggaggcctgtgactgccggctttcccctgcttctctgacaacctgcatgactcagcagaggcagccataatcctggagagccccggtttaagatctccaggtgaagtagatttttattgtaagtaactcctgtactttttaagttgtgagacatgcattcaaggttgaattctgaaatcatgtctgaattaacttcactggagtcttctgttgcccttatagagtagggaattctcatagttctgctagtaattgttttttgagggggcaggtgtggtctaacaaggaaaggctagagagcaattaggaccaagggaaagaccttgggccatggaaggttgagttctctgaaagttttaaaaatataaatatgtatttttactctagagatgcggtctcactaagttgtccaggctggtctcaagtaatcctcctgccttagcctcccaaagttctgggattacaggaatgagccaccacacctggcctcacctcagaacgttttgaaaattttagttttgtctgtttgcttgttcaatcattctgcatgactggatatggtgaggatcatgtaatttgggggacagaggaagaactcttggatttttttggatgactttactggtgcgatgagttccctggtcacttgacagggcaagtagaattcctcaggaggggaaaatttgttctaagagaacaaacagttgcagctgtgggcttcttacgtggaaaagcttctagtcaataagtgaacataaaaacaatggccagggcatattaataacactgacttaggaagttgaataaaatatctttgccaatagagaaagagtcctgctagaggtggctctcttcctcgttctacctttataacttttccaggattctgttgttggcagatattccaagtaaggagtgaagtttccccacaaatgatgatgaaggcattgagtcagtattttcccatgatgaaaaattttgtgaagactgaacttcaggtcagggacgaaggagagcccaagtagccttctcagtgtcttcaaagcctatctttggactttttggtgggtaaaacatccaccttgttttcaattagccttttcatcttcaggggcctttaactgagatattttaatgtcctcaaatagaggataaattggcaaactgagtaggtttaatatctggtctgattacagtgggactgggacagatttataaactgctacttagcatacttatcagctgagcttccccttgccttaggggtctattgcccatataagcttctatcttgagtatggccagctcttgtaataataaggcctctaggaggttacccacatttcccattttaaactagtagtcacaaattccctggctttccacaacaggtcaaagtcatgtaataccctaaaaacatatctgttatctgtgttgatgttaactctttgattcttagctaaagtgtaggttcttgtgagagccacaaattattctatctgatataatttgcactgggtaaagcctcatatgttatgggactgtggatatatgcaatggcatattcagcctggaaacctctttctgaagtcagaggtatgaactatcaacaaagaaaatgagatctggatctataagaggtacttcagaaagatcaggacggggaaaggttagagcttaggtggctgaaatacagtcatggtggttgtacttcagttgggagagaaatggtaacaaggttaagattttggtaatggtgaatagtaatgtgagaaggagcaaacaaaaggatctcataagaggtaaggttagaggttgaaaaacgttgggggttcgcagtcaggacaaagatgtgaaccacttgggcacagaagtgtgcgaagtatgacctagcacaaaatcaactgtggcttgaatcaaatttgctgttgccatgacaactcagaagcaaggaaggaaggcttgagctatagggcctagcaagaaggtaaaatatccaatgggcctcaggctccttttgtatttctgagacaggacatctaaagtatgttctctctcatgaatgaataggcagaagggcaaggagtagttggggagtcccaagctgggggaagaggaaagggaggtttttaaaaggatccaatactgttatagaggttaattctcgttctaggggttcagacaaggaatccacattctacaatagccaaccagtctgagaaagtccaggagttgtctcattgttttagataaagtgtaattaaggatgcttttcatacatctggagacaaagtttttcccttacaggagatgtcatgttttagagagtgaaactgaaaataggaaaactaaggatagtgaaattatattttgtctcttgaaaacaatgtcccttttaagtcagatcatccaaaaggtatcgagtatctgccaataaattatcaaatgtactggagcaaagaaggtggacatctacgtattgcatgacgatgcaattacaaaggaaaaccaaatcctttaaatttgcatttttaaaaatattaaacatttaggttcaggggtacatatgcaggtttgttacgtaggtaaattttgtgtcatagaggtttggtgtacagattattttgtcacccaggtgataagcaggtttcttgataggtagtttgttttgatccccactctcctcccaccctccaccctcaagtacgcctcagtgtctgttgttcccttccttgtgtccagttataagttaaaacacgtagtctttagttttctgttcctgcattagttcgcttaggataatggcctccagccccatccatgttgctgcaaaggacatgaccttttttttaatggctatgtagtattccatgatgtatacgtaccacattttctttatccagtctaccattgatggacatttaggttgattccatgtctttactgttacgaatagtgctaggtgaacatatgtgtccacgtgtctttggggcaaaacaatttatgttcctttgggtatatacccaataatgggatttctgggctaaatggtagtcctgttttaagtactttgagaaaatgccaaactgttttccctagtggctgaactaatttacgctcccaccagcagtatataagcatttccttttctgtgcaacttctccagcggctgttattttttgcggttttattaatagccgttctgactggtatgagatggtacctcagtgtggttttgatttgcatttgtctgatgattagtgatgttgaactttttttcatacgccttttggccctatgtatgtcttcttttgaaaagtgtctgctcatgtcctttgtccactttttaatggagttgttttttgcgtgttaatttgtttaagttctttatagagtctggatattagacttttgccagatgcatagtttgctaggccgtatgtttactgggttaatagtttgtggggtttttttctgtatagaagcgctttagtttaattaggtcagtttgttaatttttgtttttgttgcaattgcttttggtttcttcatcatgaaatctctgccaggtcgtatgtccagaatggtattttttaggttattttccaggatttttatggttttaggttttacatttaagtatttaatccatcttgagttgatttttgtatatgatgaaaggaaggagtccagtttcagtcttctgcatatggctagccagttatctcagcaccatttattgaatatggaatcctttcctcactgcttttgttgactttgtcaaaggtcagatggtgttggtgtgtgactttatttcttggctctctattctgttccattggtctgtgtgtctgtttttgtaccagaatcatgttgttttggttactgtagactcataatatagtttgaaattaagtaatgtgatgtctccagctttgtacttttcgattagggttactttggctattcgggctatttttttgtttcatatgaattttagaatagttttttgtaattatgtgaaaaatttcattggtagttagataggaatagcattaaatctgtaaattgctttggggaatatggtcattttagcaatattgatttttcctatccgtgagcatggaatgtttttccatttgtgtcatcttgaatttctttcagtagcgtttgtaattctcattatagagatgtctcactgccctggttaagtatattcctatgtatttattttttgtgtgaggctgttgtgagtgggattacattcttgatttgactctcagcttgaatgttgttggtgtataaaaatgcttctgattttcatacattgattttgtattctgaaactttgctaaagttgtttatcagatctaggagccttgaggcagagactattgggctttctaggtatagaatcatattatctgcaaacagggatagtttgacttcctgtcttcttatttgcatgtcttttattttttttctgttgcctgattgctctggctaggactaccagaagtatgttgaataggagtagcgagagagggcatccttatctttttctggttctcaaaaggaatgcttccaacttttacccattcagtatgatgttggctgtaggtttgcatagatggctcttattattttgtgttacgttccttcagtgcctagttggttgaggtttttaacatgaagggatgttgaattttattgaagagccttttctgcatctattgagataatcgtgtggtttttgtctttagttccgtttatgtgatgaatcacatttattgatttgcatatattgaaccaaccttgcatcccatggataaagcctacttgattgtggtgggttagctttttgatgtgatgatgaatttggattgccagtaatctgttgaaaatttttggatctgtgttcatcaaggatgttggtctgaagttttccttttttgtgtgtctctgccaggttttggtatcagaatgagtctgccttcaaacaataagtgagggaagagtccctccttctcaactttttggaaaagtttcagtaggtaccagatcttctttagacatctggtagaatttggctgtgaatccatctggtccagagcttttcctggtaggtagggatttttttttaattattactaattcaattttgggacaaggatttcaatttcttactggttcaatattgggaggttgtatgtttctagaaattttatccatttcttgtaggtttcttagtttgtgtgcactggtgcttataatagtccgtgagggttctttttcctttgtatttctttggagtcagtggtaaagtcatttctgacatttctgattgtgtttacttagatctctcttcttctttattcgtctagttagtggtctaccaatcttatttattttttcaaggaaacaatttatgattttgttcttttgtatggtttcccaagtctcaactcagttcatctctgattttggttatttcttatcttctgctagctttgggattggtttgctcttgtttttctaattcctctaggtgtgatattaggtggttaatttgagatctttctagctttttgatgtgaggatttaactttctgcttaatactgctttgggtatgtttcagagattctgataagttctttgtttttattagttttgaagaatttcttgatacctgccttaatttccttgtttacccagaagtcattcaggagcaggttgtttaatttccatataattgtatggttttgtgcaatcttctttgtattgatttctatttttattgccctcttgtcctggagtgtgattggtaagattcagtttttctgaatttgctgaaaaccatttttatggccgattatgtagccaattttagagtgtgtgccatgtacagataagaagaatgtatattctattgttttggggtggagagttctggagatgttgttaagtccatttggtcaagtgttgagttcaggtcccaaatatcattcttagttttctgcctcagtgatctgtctaacactgtcagtggaggtatcgaagtcttcccctattattgtgtggttttctaagtctctttgtagctctctaagaacttgttttatgaatctaggtattcctatgttgggtgcatatgtatttaggatagttaattcttctcgttaaattaaatcttttaccttctttgtcatttttgacttgttggtttaaagtccattttgtctgaaattagaatagcaaccctgccttttttgttttacatttgcttggtagatttttctccatccctttactttgaacctgtgggtgtcactgcatgtgagatgggtctcttgaagacagcaaatagttgggtctagttttttaactcgctactctgtgtcttttaagtggggcattttgcacctttatattcaaggttaatattgatatgtgcagtttgatactgttattgtgatatcagccggttactatgcagacttgattgtgtagttgctttatggtgtcaatggtctatgtacttaatgtgtttttttgtggtggctggcaacagtcttttgtttccatagttagcactcccttgaggacctcttgtaaggcaggtctggtggtaatgaattcccttggcatttgctgtctgaaaaggatcttatttctcctttgcttatgaagcttagtttggctggatatgaaatttctcggttggaatgtcttttcattaagaatgctgaatatatgccccctgtgccttctggcttgtagggtttctgctggaaggactgctgttaagctgatgtggttccctttgtaggtgacttgctccttctctctagctgcctttaatattttttctctcatgttgaccttgaaaaatctgatgactatgtgtcttggggatggttgtcctgtacagtatctcacaggggttctctgtattttctgaatttgaatgtcagtctctctaccatggttggggaaattctcatggacaataccctcaaatatgtttaccaagttgcttgctttctctacctctctttcagggacaccagtaagtcatagattttgtctctttacatactcctatattgctcagaggtttaaaattttttttatttaataaaatagagatggggtctcgctatgttgcctaggctggccttgaactcctgggctcaagtgatccttctaccttggcctcccaacgtgctgggattacaggtgtgagccaccatgcccagccttcttggagatcttgtttattcttttttattcttttttttatttttgtctgactgagttgattcaaagaactggtcttcaagccctgagattctttcctccacttggtttattctgctgtaaatacttgaaattgcattatgcaattcttatacagagttttcagctttatcagctcattttggttctttttttaaatggttatttcatctttcatctcttgtatcattttattggattccttaaattcaattgattgggttttttgtttggtggtggtggtggtggttgttgttgtttttggagacagaatcttgctctgtcacccaggctggagtgcagtggtgcaatctcggctcactgcaacctccgcctcccacattcaagcaattctctgcctcagcctcccaagtagctgggattacaggcatctgccaccattcctggtgtgtgtgtgtgtgtgtgtgtgtgtgtgtgtgtgtgtgtagtagagacagggtttcactatcttggccaggctggtcttgtgaccttgtgatccaccaacctcagcctcccaaagtgctgggattacaggcctgagctaccgtgcctgggcttgattgggttttgactttctaatgaatctcaatgatcttcattcctatccagactctgaattctgtatctttcatttcagtcatttcagcctagttaagaacccttgccaaagaactagtgtggtcatttgaaggtgagaagacattttggctttttgagttgccaaagttcttgagctggttgattctcatttgtgtgggctgatgttcctttgatctttgaagttgctttcctttgcatggggttttttgagtttatattcttcgatgcccttgagggtttgagtgtggtacaacatgggttcagtcaactgtctttgtttaaagtatttcagggggccaagcctcagtttatcactcctggtctgcatgttctaaccctggggggctagtattgggctctagctttgttctctggcccttcgaggttagaaacttgctgcaataagaggggctaaggtgttcctggctcactggccataacactctgctggttgggtgctggccaaagtgctttgttgtggcagtggcagtgggatccgtgcttacatgtgtgtgccagcagccacagcagcacagtagggtgcctgcacatcagcagtggcagggcaccagtgggggtggggtggcagcattcatgcatgcactagcgctggtggtgatggcatggtgggatatgcatgcgtcagtgggaaccaggcactagtgggggtggggtggtggtgtctatatgcgtgcttgtgctggtggtgatggggtagcagggtgtgcacacatgtgctggcaggggaggggaggtgagatctgcccacactcatactgacaaagctgtgagcatgggctgtgggtgactgtgtgctggaaaagtggtgggaggaggctgcagtggggagaggctgcaaggtggttgattgcacaacagtggaaactggcctgctggagccagagttaggcatggtgagcaggtgaaggaattattatgacggcccttggaagcaccctggtttggcatctgagtctgtgctgcaagcagatgcagcagggctggagccccaggagaggctggtaaacaggggcacactcagatcaaactggtcccattccatgggcaagacctcccttctctgtctaggtctggcagccaccaaaggccaaagccacctagaggagctttcttccagcttcagttcagggtctgcgtcttccctctgtccactctcaatgccttccctctgaaggtctgcttggagtatggcagtcttccctatggtctggtgtctcagtgagtgatgctcttcctggctgcatctagtcagccatcattggctcctctctaaatttgcatttaatgtctgggaaaaaataggctgttaatctttgaggcataatagtccaagtgtaccgctaatttccccaggtgtgaaaatgaataaatttaaaagctgttggaaccccaaagaacacttttaagccttgatagagatgtgactgtgatctgagttatgtatggtctcagcttctgttctcagattataatcataggttaactcgttttcttatttttcttgatctgttcaatgactagagagaattaaatgatggcagggacaaaagcttcctgccttcttaattaatgactgttgttgtagattaactcccctttattgtcctgatttgcttagacaagatgacagaaaacccacgattattacagcctttgcaaaaaaaaatgttaaatgtactcttactcataagaaacactgcatataactaatcagatttctgtgactatctatgtgcaaaccctgtatgaataatgcaaccctgctaaaaactcctctgtctctgcctatctaaacgaaatcttaacttccctgcttcggattgctgactctattcctttggagttgggatttctgggtgggccatcctcacattctgtgtgtgaatgaactctctttaaactagactctgactcttttaattattttaggttgacatttgataacctgcagatgggacctgaagtaagccttctgcaatcttcactgctttgctgacatctggagctttggtacagcacaagtggcttttacttctttgacttcattggacctggagagggtctctggcctggcttctctcagattttgaatctctctggttttggctgagattcagactttattgaagcatcctgattccacgctcaagaaaactgaaattgaagctttacttttaaaagtaggagtttcatttgttatttctctagagattctgtggtttgcagatttgtgctttcacattcctttgaggataaggttttgttttattcccaaaacttttcagccttttcccttgttcaactttggtgaaggagaaagtgtttctctttgaaaagaggaagcaaatctttgtggctcaaattaaatttgtgattttatattttctaggttctgaagcttggttcagctgacatagctaaactcttcttgagtgaccagaatttccatttccacggtcttcggtcacttaagagaactcaaattatggactattgtccctccaaaatcaagtctttctccctaaggagagatccacctttagaaactccagctgcactcatgtatgaaacttatggtgccacttcttgtcattatttagaaaatggttgcacataactcatgaaaaactaaaattgcaatggccaaagtgggatacctcaactaatttacctgtgtgctcaataagaaaaagctggttctaggataaaacagaatagttaggagagttcttttcaatggtatttaaaacatccaaaagagattttaatagagttacttctttacaaaaggagaataaaaagttacctaaaacaatttccaaatttaaaaagacagctgaaatttctcctcctcctccctcacctcctccttctctttgtcctttattacctgggctactttacctagaacgacctcttctttctcctccccctgcttctgctctggttccatccctggaacagccagtgtctggtagggattaacctgccctagtgtatcagtcacggtagaacttaaaggtagaattaaggaatttcctgatcctcactaggaccctgtgagtcctagtcttctggttttgccagaaaaatcgcaattaaatatttgagcttatgaccctggctctattttaagatgaataaaaattactttaaatggagaactaacacaaactcttattaacagacctggaatcaccttatctgtaataaagtccaccttattacaaggtcccattccttgaagtaaacaaacaattcaatctgtagttgtcacaaatactctaagagacttcttagaattatttaatacctacatttctttctccccaagaggaaaatgtatttagaattagatgataaaactgaattattggacatacttttgtcaacaatccatattgacatggaagacactaaattattgagtagtaaaaaattataaaacccactaaatgtagtacctaatcaatcatggttaaagtcttccactgattttggaaaatttatcttgcctaccccaatcaaagttcaatagattcatcaaaaccccttccaaaccttaaacaataccctctaagaactgaagccctaaaaggtataaagcctatagtttcagattatttaagaataggacttgattattccctgtaacagccaatgtaatactccagtccttcctgtaaggaaatcaaacgatagaggatggaggtttgtacagaatctgacagcaattaaaaacatagtcactctttgacatccagaagggccaaacttccatatgttgttgactgacatcccaactgaacctgagttcttttctttttactttgagacagggccttactctgttgcccaggctggagtgcagtgtgattatagctcactgaggcctcaatctcctgggctcaagcagttctcccgcctcggcctcctgtatagctgggactacaggtgcgcaccacaacacttggctactttttgtatattttgtagagatggggttatcccccttgttacccaggctggtcttgaactcctgggctcaagccatccacctgcctcggcttcccaaattgctgggactacaggcatgagccacctcgccggctgaagctgagttctttactgtaatagacttatgtagtacattctttaatatttctgtagataaaaataatcaatttctcttcaccttcacttgggaaggaagacaatacacatgaatagtcatgcctcagggatgaactgagagcccagcttacttttcacaaatattaaaagcagatctcccagatattgacttcttgaaaattcattttaataaaatacacaggcaatttactcctctgctcagaggataagcaattatttcttaaaaatgggattcacttgttacaacaattagactcaaagggacacaaagcttctaaagaaaaacaccgcctgtaatcccagcactttgggaggccgaggcgggtggatcatgaggtcaggagatcgagaccatcctggctaacaaggtgaaaccccgtctctactaaaaatacaaaaaaaaaattagccgggcgcggtggcgggcgcctgtagtcccagctactcgggaggctgaggcaggagaatggcgtgaacccgggaagcggagcttgcagtgagccgagattgcgccactgcagtccgcagtccggcctgggcgacagagcgagactccgtctcaaaaaaaaaaaaaaaaaaaaaaaaaaaaaaaaaaaaaaaaaagaaaaacaccaatcctgtcaaaaacaagtgacgtgcttaggccacctaatatttaaggaaggactttctattagtccataccgactgaaaggagttttagctcttctgccatgaagaaccaagaaacagctgggagagttctgggggctggcaagacatttaaaaacttggatcccaaacttttctttaaaagcctgccccttggccggacacagtggctcaggcatgaggcctgtaatcccagcactttgggaggctgaggcaggtggatcacctgaggtcgggagttcgagaccagcctggccaacatggtgaaaccctgcctctactaaaaatacaaaaaaaatagctgagtgtggtggcgggagcctgtaatcccagctacttgggaggctggggcaggagaatcgcttgaacccgggaggcagaggttgcagtgagccaaggtcgcgccagtgcactcaagcctgggcaaaaagaataagactccatctaaatgaatgaatgaatgaatgcctggcccttacatgcttcttttaaacaggacattccagaccctcttgtttggacagaagaaaatcaagaaatgtcagaaatgatcaaaaatgactttactaatgcccaagctttggtgcatgcagattataatcttctattttcagtatttgtacatgaaagtgatggaaagattttaagggtcctgactaaaaaacatggagcccaaagagacctgtggggtattgtagccaacagttagactctgtaataagaggatttccatcttccatgagagccgtaaagcccctgctttgttagttgaagcaactgacgaaattctcatggtgacagcccttagtggttttgtttctcattcttgtgaaagcatttgctaaactcgcgtcatactcaatattattcagttagtagactagtctcatacgaagttttctttctttcagcttctcatatcaacatctctagatgtaataacctaaatcctacaactcttctgtctccatttccagataaaacactgcactattgcataaccctaactgatcactgatcaacttctttctcccaggactgacctcaaagagaccccccttactactgccaatggtgtttggtttacaaatggatcttacttaaaggataaatctgggacttaccactcaggttatacaatagtatctttaactggggggaaaaaaagaaggaggagaagaagaagaggaaagtgttaagcttctaggcaccacctgagctcaacaaacagaattaattacattagtcaggacttgtcaattggcaagaggaataactgctaatattaatatagagagtagatatgtttttagagtagctcatgattttgaaacactatggaaacacaggatttttaacttcttctggtcagtccttaaaaagtggccacctcatttcatgatttttgaaagctatattattaccacagtcactgtttataattaaaattccaggccatttcaaatcagatatcccagaaagcaaagaaaattagctagctgataaggtagcaaaaagagtggctctaaacaaaaacactctgtattaactcttaaacacctgaatttgatataaaattagctcaatccagagctccaaaatcagaatacaaaatcacactttgtgcttgaataaactccctttaaattagactctgattcttttgattattttaggttgacgcaggtgaaggcaaatagatgctgtgattcagggcagaggaatttactggagaaggtggaaacatgagtcaaccgtgaagtaattggtgtcagggagtattgaaatgaggatggttttagggttagaaactaaagggaatccaggcttcattagtttgtttatggcttgcaggtattggactatttaatattcttcccattaagcttttgaataggctttatttatttttctgagacggagtctcgctctgtcgcccaggctggaatgcagtggcacaatcttagctcactgcagcctccacctgctgggttcaagtgattctcctacctcagcctcccgagtagctgggactacaggcgcacaccaccatgcccagctaatttttgtatttttagtagagacagggtttcaccatgttggccaggatggtctcgatctcttgactttgtgatctgcctgcctcggcctcccaaagtgctggaattacaggtgtgagccacggtgcccggccaataggctttattttttagaacagcatttgatttacagaaaaattgagtatatagcacagagaattcccacatatccctgttcctctttacacagtttcgcctattattagcatcttgctttagtgttgttacagttcatatactttacattgttaaatatagtctatttaaagactatagtttatattagttcactcttggtattgtatggttctaagggttttgacaaactcataatgatttctccgttacaagatcatgcagaatagttttacctcctaacactgtctatgttctacctattcattcctctccagctctctccaagcctctgccaactgctgatctttttactgtctctatagttttgtcttgtctagaatgccatcagtgtgaagttcctccatgtcttacttttttcttaaactcagtggcaagaagctccatgtcttttaattgtgtgatagctcattttaaaagttgctgaatcgtattccatcgaatgactgtactacagtttattcactcacctattgaaggatatcttggttgcttccagttgttgacaattttgaataaaaccgctataaacatttatgtgcaggtttttgtgctgaaataagtagttaaatatctaggagtacaactgctggatcagatggtaaagctatatatttagtttgtgggaaacttccaaattttccaaagccactctgccatcgtgcattcccaccagcaataaatgaaagttcctattgctcttcatccttgtcagcatttggtattgacactggtatctattgtagtttgtttatttatttaatttttagtgtttgagacagggtcttgctctgttgctcaggctggagtgcagtggcacaatcatggctcactgcagcttccacctcctgggctcaagcaatcctcctgcctcaacctccagagtagctggacctacagacacatgacaacacacatggaaaatttttaaatttgttttgcagagatggggtcttgttgcccgggcttcttgacctcctggtctcaagtaatcctcccacctcggcctcccaaagtgttgtgactacaggcatgagcttctgcacctggcttcactgtagttttaatttgcaatttcctaatggcatatgacttgagcatcttttcctatactcatttgccgtatgtctaccttctttcatgagatatctgttcagatcttttgcccttttttttttggttttttgttttgagacagagtctcgctctgtcgccgaggctggagtgcagtggcactgtgtcagctcactgcaacctgcgtctcctgggttcaagcaattctcctgcctcagcctcctgaatagctgggattacaggtgcccatcaccatgcccagctagtttttatatttttagtagagacggggtttcaccatgttggccaggctggtcttgaactcctgacctcaggtgatccgcccgccttggcctcccaaagtgctgggattacaggcgtgagccaccgtgcacggcctcttttgcccatttttaagtttttattcttaattgtgacaaaatatacataaaatttaccatcttaatcatttgtaagtgtacagctcagtagtgttaaatacattcacattgttggcagtcattctccagaactcttcgtcttgcaaaactgaaactattcccattaaacaactccctattctgcaacttgccctcctccccctagttcccagcaaccaccatttgttatgggaaaaagccagaacagtatagaagcaagttcccccatactgggaaggagccaagacaccaaagaatgacttagataagttcagtttgaggagtagatgagtttattgggacttacctacagggtactcctgggcagcagcaaggcagcaggacaacatggaggtctgctctgccacctgtctgcttttcatttatgatctatttatttttactttaaaataattttatttttttgagacggagtctcgctctgtagcccaggctggagtatggtggcactatctcggctcactgcaagctccgcctcccaggttcatgccattctcctgcctcagcctccccagtagctgggattacaggcgcctgccaccacacctggctaattttttttgtatttttagtagagacggggtttcaccgtgttagccaggatggtctcgatctcctgaccttgtgatcgacccgccttggcctcccaaagtgctgggactacaggcgtgagccaccacgcctggccaactttaaaataattttgtattaattttcgtgggtgcgtagtagatatatacctactcatatacctcatagtaggtgtatggggtatatgagatgttttgatattggcatgtaatacataataaacacatcatggaaaatgaggtattcatcccctcaagcatttattctttgtgttataaacaatccagttatgctcttagttattttaaatttatttatatatatttatacatttatttaatgtgtaaatattattgactatagtcacctttctaagctgcttttttttttttttttttttttttttttgggagacggagtctcctcgctctgtcgcccaggctggagtacagtggcccgatctcggctcactgcaagctccgcctcccaggttcacgccattctcctgcctcagcctcccgagtagctgggactacaggcacccgccacctcgcccagctaattttttgtatttttagtagagacggggtttcaccgtattagccaggatggtctggatctcctgacctcgtgatccgcccaccttggcctcccaaagtgctgggattacaggcatgagccaccgcgcccggcctctaagctgcttttaggctaattttctggctcttttcctactgtgtgtgcgcaatgggactgttttccttggtatgctctcagatatactctgggatgtttcggttctcagggatacctgctccttgggtgggccactgactcactgcctagctttcagggttcaggcagcagacatagatccttaagtaatctggtgggtgactcatcacactacactcagccatttcattttcttatagcagtgtctaatcttaggtgttgtacatggaaaacaaaggcgttacaggaactgcaaatagggatgcggaaccttttgtcaaggaatccttgaataataaacagatctgagaccttcacttgcttcagattttgaaggaaactgggatagtccatggagggggaatggtggagtctatttctacttttaagggccctacttccccaatatgtctgttgatcctgtagccaaagaaactgatggatgtgagtgagcatgttctgagtgagggatgccaagggcttggggaattatggggggagcaaggaaacgggtgatctatcagagctgttggaggataaaggccagggggaaggagttccagaacttcaggaattagtacgtcggataaacaaaaatattaacattccaaatagaaagtaaatccctgctaatagattaacagggattgtgaaatttaacaaaaagctgtgttgggcatgatggagtccaagagacaccaaaaggggcttagaaagaggcaaatcatccacccccactactgaggcattatggtaaggaattgtgagggttaagggtagagtaggtggttctagtatctattagaaaggtcatagggtgctcactgactgggattattatttctccctgtgtgttcaagggtatcagggggtgcacaagagcagattcctcaaaggggagtcactgggatgctgacgtttttctttttggaccttgagataattacaggtgctccagactactcatgatcgtagggatgtcgaggtgacttcaaggccttggggtgattccccatgagttgtttcagttggagatccatgagtttgcatttttcagattatttagatgcctgtacatcttttgggtttctgctaaaacatggatcttaaagagaggggcattttggcagtggtacctttggccagttacttaagtggaatttcattctctcttggcttccttcacagatgatgtatgaaagcatgaaattcaaagagacaaagggaaattgtgtaaaaagcagatcagccctctgctttactcttaccttctaggtccacaaataggtataacttgaattaggacaggtggagaggagcatataattaatacgatgttaattagtatgagtaaactctctgagtttagtatggagctcattaacaaaactggtaactaaagcagatgccgtttagagttaaacctgggtaatctttccagttgttttctaagtggtattcatagacagagactaattcatctctttgttgtcggtactcttaagtctttgatgagttgattttagttgagaaggctgtggaaatagaatctgaaagcttttctctgatttctccatctgtgatagcccctaggtgttttgagatttaactgtaggtcttcattaattttggtactctcaaaccctagggaggcatctctaggtcctataagaagtttgaataattagtaaagatcttaaagctctagagaagatgcccctaagattgactaacttgtgtaaaaaatttctcccttcatggccgggcacagtggctcatgcctgtaatcccagcactttggaaggccgaggtgggtggatcacttggggtcaggagtttgagaccagcctggccaacctggtgaaaccctgtctctactaaaaatataaaaattagccaggcatggtggcatgtacctgaaatcccagctactcaggaggctgaggcacgagaattgcttgaacctgggaggcagagtttgcagtgagccgaggtcatgccactacactccagcctgggcaacagagcaagactccatctccaaaaaaaaaaaaaaaaaaaaaaaaaaaaaaaaaaaaaaaaaaacaagaaagaaaatttctcccttcattgtatgtagtttcattttcaaaactacagtttcaaaaggccacaacatgacaaccattacaattgatgaccccgaggtggtccattttgtgcactggtcttcttcatctttagttacaagctcagcttcctctctaagtcttgaggtatccttgtatgtaatgatgatatcatttgtcgaatgcttattaaattgtatagactgtgttaagagcaagtttgcacagtaacccttttaatcctcaagtatctctatgatgtaggttttagtattttgattttatagataaggacatagaggctgtatcctcagtaatatgtcatgggtcacacagcaagttaggggcatggccagaatgtgactgaagtgtgttcagctcaaaaccctatggccttaactactacaccagtctttctccattatctcatcctctgagatgcttcccatgaggcagtctcaaactcttaagtccaactcaaagaaaatggcttatctgaatatggtttaatactgttttgatttagaggattttcctattgcctaaaggctttgcagtggtgagaatgggatgggaattcccaaagtcacctggacaagtttaatattaatttttgtgggtacatagtagatatatatacttatgggttacatgagatattttgataaagcatgcaatgcgtaataatcacatcagaatggagtatccatctttgctaaaggataaagcatttatcctttatgttacaaaaaatccaattatactcttttagttattttaaaatgtataattaaattattttttactatagtcaccctgttgtgctagcaaataataggtcttactcattctttcttgccaagaccagctcggtcggggagaccctaacccagtggcactagaggaattaaagacacacacacagaaatatagaggtgtggagtgggaaatcaggggtctcacagccttcagagctgagagcccccgaacagagatttacccacgtatttattaacagcaaaccagtcattagcattgtttctatagatgttaaattaactaaaagtatcccttatgggaaacgaagggatgggccggattaaaggaataggttgggttagttaactgcagcaggagcatgtccctaaggcacagattgctcatgctattgtgtgtggcttaagaatgcctttaagtggttttccatcctgggcgggccaggtgttccttgccctcattccaataaacccacaaccttccagcttgggtgttaagggccattatgaacatgttacagtgctgcagagattttgtttatggccagttttggggacagtttatggccagattttgggggggcctgctcccaacatgtctcccttctttgatttgcaaagagataaaagcaaaggcagctttgtcacagtgagctacttctcacaggagtcaggatccacatctgcacactatacaaagacaaacaacatggattaaaagcacaatcatcattgaaatacagagcttccaagtgtttttatccattctaatgggttactagctgctaatttgtctgcagctcctttaaggactccagttcctggcattaaggtcaggtgtgcctgggatgctttaaatatttgttcttttaattttgccatatccaaaaacaagtttgtagagtgtccttctagatgcctttttattctttcccaaattttgatcttattaagaacatctaatagtttccacaaatccttatgttaagcttctagagcaggccatatcatttgaggttgaggtgccactataccgccacggttccagataataggaacttttgccatacttcttatcatttctaccatctgaccgttttgttcagatcatctgaacatagtgtggccatggcacgcagactgagaggtgcaattcaagctaaacatccccttagggtaccaattaataatgattccataggaatcattgtgcagcacctctgtctgttctgcaaagcaatcttcctaaacaagtacgttcatctttttctaactgggtccaatcctgtttacaaaaaggtttttgaggatggtatgcctcaattatatgagcagatttattatggtaaatactgagatcagaaagcatgtgtaactgtgtcagagtgattgcatccaggcattattgccggccaagattgataaatatgcccaataagtataactgttctctgtgtcagcccctgttgaaggaatactcatggcagtggtgataaccgctatcatagctaccattaaattattcattgtgactggttgtcccgctttcctcaggttttcttccgccatctgtgacagcttcttgatctgtccccaggtgggtggctgtgtttgacgggtgttgctcgtgacaattggggtcctcctcagcatcagtcttgacatggctgcaactggggggtcctcgggatcctcctgtaatctggcttatgctaaggtttcaggtgtattgatggtatccagatcagctgttgattttggcctggagaaacacaagcataacctctaccccaggttatcttcttttcaggtaatgctgtatctgcgtttgagaccagaggcattaacatgggttaaattgtgagtgtctagcattagatattgcattagcaactaggcgatcagccatttgattcccttcagtcaaagatcctggaagaggtatatgagccctaatgtgagtgatgtaaaaagggtgcattctacgtctaactgctgtttgcaattgggtaaataaagtcatcagttgtgtatctgtatgaaatcataactgagcatttttaattaactctgttggaatgaaccacatatgaagaatcagaaatcacattaataggcacatcaaaagcagtcaatacctcaattaccactacaagctctgctttttgagctgaagtataggacgtctggaaaactttactttttgagccaaaataagaagctttaccattactagacccatctgtaaaaacattctcagccccttcaattgatttaaacttagttattttggggagaatccaattagttaatttcaaaaactgaaacagcttcattttaggaaaatgattattgagaatacccacaaagtcagctaaatgggtttgccaagtaagactttttataaaagcttgctgtatttgtgccttcgtgagagggacaataatttttctaggatcatatccatgtaatttaacaatctgagttctcctactccctatagtagtgatttgatctaaataaggagttagagtccatgaattagtatgtggaagaaaaagccattttactaagtcctgttcttggacaataacaccagtgggtgaatgctgagttgaaaaaattagcaaatctagagtcttctctggatctattctatttatttgagctttatggacttgcttctcaatcagttgtaactctgcctctgcctcgtttgttaattgccaagggctagtgagactaggatttcctctaaggatagaaaacagattactcatggcataggtaggaatgcctagagcaggtcgtatccaattaatatcccctggtaatttttgaaaatcatttaatgtttttaatttatccctaagtatggttactttctgtggcacaatggtagtgtcatttactaaggtccccaagtaagaataaggagtagtagtctgaattttgtcaggagctataattaaactaacgcaagaaatcgaattttgcaagtgatcataacattggagtaatatttctcgagtggggcagcacaaagtatatcatccatatagtgaataatgtaacactgtaaaaactttttacgagtaggttcaattgcttgccccacatatgtcaggcaaattgtggggctatttaacatgcccctttccaatgaatacgctttccaatgaatacgcttagcaggctgcaggttgtttactgcaggaattgtaaatgcaaactgttcacagtcttgctcagctaaagggatagtaaagaaacagtcttttaaatctttgactatcaaaggccaattttttggaattatagcaggagaaggcaatcctggctgtaatgctctcataagttgtgtaactgaattgatgtctcttaagtcagttaacattctgcatttacctgattttttcttaattacgaaaactggagaattccaaggggaaaatgttggagctatgtgcccattttctaattgttcagtaactaatttatctaaagcctccagtttctctttacttagcgtccattgttctatccaaattggcttatctgttaaccattttaaaggtataggttctggaggcttaacaatggccgccatcaaacattatttcctaatttttggcgagaactttgtttttccacttgaagcagttctttcaaaccttgcaaatttttttctagtcccataccagggacataccccatttcatgcattgtatgttgactttgagggctatataattgttctggaattagaacttgtgctccccattgttgtaataaatctcttccctataaatttacaggtacagaagttataattggttgaatagtcccaggttgtccatcaggcccttcacagtgcaaaatataactactttgatatacttcaggggctttaccaactccagctatgttaaattgagcaggttgaattggccatgcagatggccagcgctgtagagaaatgattgaaatgtctgctcctgtatctaccaaacctttaaatttctttccctgaatagttatttcacaggtaggacgtttatcagtaatttgatttacccaataagctgctttgccttgtttatttgtgcttccaaatcctcctattcgtttaatttcactttttcccattcccacatacggcaaaatcaggagctgtgctatgcgctctcctggctctgctctccaaggaacagaagtagatgtaacaatttgaatttccccattataatctgaatcaatgactcctgtatgtatttgtatgccttttaaacttacactagaccttcctaaaagtaatcctatcgtccctgctggcaagagtccacagactcctgctgggaccttttgcgggggttccccaggcagaaagctcacagcttttgtgcagcataaatctactgtggcactaccagctgtggcgggggacagacattgtacagcagtgagggaaaggcctgagctggaaatgccccggtttagaatggggcccgggatgggcccctcatggcatttcccgaaattgggttcccttctttatcaaacttagagtgacactgattagcccaatgttttccttttttacattttggacatatttcaggatcagcagttttcttttttcccctaactgacggcctgactcactgattttttctacattctatttagtatgaccatgcttcccacagttaaaacaagttccaggaaacagagtatttcctttatccactctcagtcctgctattgcctgtgctagcagagtagctttatgcagattacctccaataccatcacaggccttgatataatcaactaaatgtgctttccctctgataggtcgcagagcagcctggcaattgggattagcattgtcaaaagctaataactgcaacactatgtcctgagcagccgaatctgcaatcatctttttaagagacttctgtaaccgagctataaaatcaatgtatggttctcttggtccctgttttatagcactaaaggaagggtattgttccccacctgaagtgattttttcccaagctctaatgcacactcctctaagctgttctaaggcatcatcctgcatgaccagttgtgcatcaaaaccagcccaaccaccaacccccaaaagttggtgtgcagttatattaatttgaggttgggcctgggcattgtgagaagccgaatggaagcttcgtctgcccaccaagttttaaattgtaagaactgagcaggggttagacaagctcgagtaagagcatcccagtcagtaggaatcatctgactggaaacagcaacattctttaacagtcccattacaaaaggagaacctggtccatactgatttatagcttgtttaaattatttgagtaatttaaaaggaaaaggctcaaatgtggctataatatttcccttttgattgggggtgggaggggtgtattctaacagggaactgccaagcctctaaatcaccctctcatctagcttgctgaattcctacctgaatagaactaaaagcagtcgcttgaggcgctgctcaaatagtcacaggggcaactacttttcgccccgtgtcctccggaaaagaaagatctggagggtctttttcttcaaaataataatgagggggtgcagaagggtagggatgaacctctccttcctttgctgctttagctggtaaatgaacatgctctgtaacctcttctgttacttcactatactctccttcctcctcatgatcagtgtgaaaaagttccaagatggaatgaaccagaccccacacttgtcccattgttacccttccaagctccccttcttactcaccacggggattgctttaagagtactcctgtgtcctccagctggttttccattccaactgttgctctggcgacccttcgacctggatttgagcccccacgaatggacaccacttgccgagaccagctcagtcggggagaccctaacccagcagcgctagaggaattaaagacacacacacagaactacagaggtgtgaagtaggaaatcaggggtctcacagccttcagagctgagaaccccgaacagagatttacccacgtatttattaatggcaaaccagtcattagcattgtctctatagatattaaattaactaaaagtatcccttatgggaaaagggatgggctgaattaaaggaataggttggactagttaactgcagcaggagcatgtccttaaggcacagatcactcatgctattgtttgtggcttaagaacgcctttaagcagttttccgtcctgggcgggccaggtgttccttgccctcattcccataaacccacaaccttccagcttgggcgttagggccattatgaacatgttacagtgctgcagagattttgtttatggtcaattttagggacagtttatggccagattttggggggcctgctcccaacactttctaatttttttgtacccattgaccatctccattccccacgccctacccactccccccaccacattatgcttcccagcctctggtaagcatccttctactctctacgtctatgagttcaattgttttaattgttggctcccacaaataagtgagagcatttagtctgtctttctgtgcctgactgatttcacttaacataatgacctccagttccatccatgttgttgcaaatgacggaatcttatttttttatggctgaatagcactccattatgtaattgtactatattttctttattgattcagctgttgatgaacatttagtttgcttccaaatcttggctattgtgaatagtgctgcaagaaacatgagagtacagatacatcttcgatattctgatttcctttctttcgagtatatacctagcaatgggattgctcaatcatatggtagctctacttttagtgttttgatgaacctccatagtggttgtattaatttacaatcccaccaacagtgtacaagggttcccttttctccacatcctcaccagcatttgttattgcctgtcttttggatataagccatttttaacctgtggtaagatgatttctcattgtagttttgatttgcatttctctgatcagtgatgttgagcaccttttcatttacctatttgacatttggatatcttcttttgagaaatgtctattcagatattttgtctgttttaatcagattattaggttattttcctatagagttgtctgagctccttatgtattcttgttattaatcccttgtcaaatgggtagtttgcaaatattttcacccattatgtgggttgtctcttcactttgttgattgcatcctttgctatacagaagtttgtttttttttttaacttgatgtgatctcttttgttgatttttgcttcaattgcctgtgcttgtggggtattactcaagaaatttttgcccagaccaatatcctggagatttccccctatgttttcttgtagtagtttcatagtttgagaacatagatttaaatctttagacttaagtctttaatgcatttgatttgatttttgtatgtggcaagagataggagtgtagtttcattcttctgcatatggatatccagttttcccagcaccatttattgaagagactgtcctttccctgatgtatgttcttaacatctttgtcaaaaatgagttcactgtagatgtgtggatttatttctgggttctctattctgttccacttgtctatgtgtctgtttttgtaactctaccatgctgttttggctactatagctctgtagtataatttgaagtaaggcaatgtgattcctccagttttgttctttttgctcaggatagctttggctattctgggcttgtgtgtgtctgtgtgtgtgtgtgtgtgtgtgtgtgtgtgtgtgtgtgtgtgttcccatataaactttaggattgttttttctatttctgtgaaaaatgtcattgatattttgatagggattgcattgcatctgtagattgctttgggtagtatggacatttaacaatattgattcgtctaatccataaacatggaatatctttccatttttttgtatcctttaaaatttttttttagggccccataactttgagtatagttttattctgaataaagtgaatatattcttttcgtgtgtttatatgtttatacaaaagtagatgaacagatgtaggcacaattgaaataaaaggaaattctttaaaatattaatattgtattattaattgatgagattataggttatttgaaacgtcttttttatagtttttgttatctttttttattatactttaagttttagggtacatgtacacaacgtgcaggtttgttacatatgtatgcatgtgccatgttggtgcactgcacccattaactcatttaacattaagtatatctcctaatgctatccctcccccctcccccaccccacaacaggccccagtgtgtgatgttccccttcctgtgtccatgtgttctcattgttcagttcccacctacgagtgagaacatgtggtgtttggttttttgtccttgagatagtttgctgagaatgatggtttccagcttcatccatgtccctacaaagaacatgaactcatcattttttatggctgcatagtattccatggtatatatatgccatattttcttaatccagtctatcattgttggacatttgggttggttccaactctttgctgttgtgaatagtgccgccataaacatacgtgtgcatgtgtctttatagcatcatgatttctaatcctttggctatgtacccagtaatgggatggctgggtcaaatggtatttctagttctagatccttgaggaatcgccacactgacttgcacaatggttgaactagtttacagtcccaccaacagtgtaaaagtgttcctatttctccatatcctctccagcacctgttgtttcctgactttttaatgatcaccattcttactggtgtgagatggtatctcattgtggttttgatttgcatttctctgatgaccagtgatggcgagcattttttcatgcatcttttggctgcataaatgtcttcttttgagaagtgtatgttcatatccttcgcccactttttgatggggttgtttttttcttgtaaatttgtttgacttctttgtagattctggatattagccctttgtcagatgagtagactgcaaaaattttctcccattctgtaggttgcctgtttactctgatggtagtttcttttgctgtgcagaagctctttagtttaattagatcccatttgtcaattttggcttttgttgccattgcttttggtgttttagacatgaagtccttgcccatgcctatgtcctgaatggtaatgcctaggttttcttctagggtttttatggttttaggtctaacatgtaagtctttaatccactttgaattgatttttgtataaggtgtaaggaagggatccagtttcagctttctacatatggctagccagttttcccagcaccatttattaaatagggaatcctttccccatttcttgtttttgtcaggtttgtcaaagatcagatggttgtagatatgcggcagtatttctgagggctctgttctgttccattggtctacatctctgttttggtaccagtaccatgctgttttggttactggagccttgtagtatagtttgaagtcaggtagcgtgatgcctccagctttgttcttttggcttaggattgacttggcaatgctggcccttttttggttccatatggactttaaagtagttttttccaattcagtgaagaaagtcattggtagcttgatggggatggcactgaatctataatttaccttgggcagtatggccattttcacgatattgattcttcctacccatgagcatggaatcttcttccatttgtttgtatcctcttttatttcattgagcagtggtttgaagttctccttgaagaggtccttcacatcccttgtaagttggattcctaggtattttattctctttgaagcaattgtgaatgggagttaactcatgatttggctctctgtttgttattggtgtgtaagaatgcttgtgatttttgcacattgattttgtatcctgagactttgctgaagttgcctatcagcttaaggagattttgggctgagacaatggggttttctagatatacaatcatgtcatctgcaaacagggacaatttgacttcctcttttcctaattgaatacccttgatttccttctcctgcctgattgccctggccagaacttccaacactatgttgaataggagtggtgagagaaggcatccctctctcaagacagggcatccctgtcttgtgccagttttcaaagggaatgcttccagtttttgcgcattcagtatgatattggctgtgggtttgtcatagataccttattattttgagatacttcccatcaatacataatttattgagagtttttggcataaagccttgttgaattttgtcaaaggccttttctgcatctattgagataatcatgtggtttttgtcgttggttctgtttatatgctggattatgtttattaatttgcgtatattgaaccagccttgcatcccagggatgaagcccacttgatcatggtggataagctttttgatgtgctgctggatttgttttgccagtattttattgaggatttttgcattgatgttcatcagggatattggtattaaattctcttttttttttgttgtgtctctgccaggctttggtatcaggatgatgctggcctcataaaatgagttagggaggattccctctttttctattgattggaatcgtttcagaaggaatggtaccagctcctccttgtacctctggtagaattcggctgtgaatccgtctggtcctggactttttttggttggtaagctattaattattgcctcaatttcagagcctgttattggtctattcagagatccagcttcttcctggtttagtcttgggagggtgtatgtgtcgaggaatttatccatttcttctagattttctagtttatttccgtagaggtgattatagtagtctctgatggtagtttgtatttctgtgggatcggtggtgatatcccctttatcattttttattgcgtctatttgattcttctctcttttcttctttattagtcttgctagctgtctatcaattttattgatcttttcaaaaaaaccagctcctggattcattgattttttgaagggttttttgtgtctctatccctttcagttctgctctgatcttagttatttcttgccttctgctagcttttgaatgtgtttgctcttgcgtctctagttcttttaattgtgatgttagggtgtcaattttttctttagttaattcttacgtattatattttatttttaactattgtaaataggattactttcttaatttctttttcagattgttcgctgttggcatatagaaatcctactgatttttgtatgttgcttctgtatcctccaattttaataaatttatcagttttaatttggtggagtctaggtttttccaaatataagatcatatcatctgcaaataaagataatttgacttcttcctttccaatttggatgcccttcatttctttctcttatctgattgctctagctaggacttccagtactatgttgaataacagtgatgaaagtgggcatatttgatccttgagcagtcttattgaaaaagaaagaaaaaataaaaaaagaaagtggacttcgttgtcttgttccatattttagaggaaaggctttcagttttccccattcagtgtgatactagccataagtctgttgtatatggcttttattatattgaggtatgttccttctatatcttgtttattgagggtttttatcatgaagaggtgttaaattttatcaagtgctttttaatcatcaattgaaataatcatatgtcttctgtccttcattctgttgagatgatatatcacattgattgatttgcatatgttaaaccatccttgcatccagggataaatctcacttggtcatgatgaatgatctttttaatgtattgttgaatttggtctgctagtatttgttgagaatttttgcatcaatattcatcagtgaaatattggcctgtagttttattttttggtgcgtctttgtctgcttttggtatcaggatagatctagcctcatagaatgagtttgcaagtattcccccctcctatactttttgtaatagtttgagtaggattggtattaattcttctccaaatgtttggtacaattcagcagtgaagccattgggtcctggctttttctttgctgggaaaatttttatttttttattaacagtttctatctcataccttgttattagtctgttcaggttttggatttcttcctggttcaatctgggtaggttgtacatatgtaggaatttatcaatttcttctagattttccaatttattggcatatagttgctcataatagccactaatgagcctttgaatttctgtggcatttgttctaatgtctcatttttcatttctaatcttatttggctcctctctcttttttttcttattctgtctaaagatttgtcaattttgtttatcttttcaaagaccaactttttgtttcattgatcttttgtgctactttatttcaaaatctttaattctgctctgatttttattatcttttcttctactaattctgggtttggtttgctcttgcttttctagttctttaagatgcattgttaggtaatttgtttgaagtttttttttctttttcgatgtagatgcttttagttataaacttccctcttagtacttcttttgttgtatcccataggttttggcatgttgtgtttccattaacatttgtttcagaaaacttttcaatttcccccttaacctcttcattgacccactggtcattcaggagcatattaatttccatgtatttgtatagtttctaaaatttctccttttattgatttctacttttatttcattgtagtcagagaagatgcttgatattatttcaattttttgaatgttttaacacttgctttgtgacctaacatatgatctatccttgagaataattcatgtgctgaggaaaagaatgtgtattctgcagctgttggatgaaatgttctgtaaatatttatgaggtccatttggtctatagtgcacattaggtgtgatatttctttattgattctctgtctggaagatctctccagtgccaaaagtggggtgttggcgtctccagctattattggtctgtctctttagctctggtaatctttcctttatatatctgcgtgttccagtgttggatgcatatacatttgtaattgttatcctcttgctgagtcgatccccttatcattatataatgaccttctttgtctcttcttatagtttttgtcttgaaatctattttgtctgatgtaagtgtagctacttctgctcctttttagtttccattggtatggaatatctttttacatcatttttagtctgtatgtgtcttccataaatgaagtgtgtttcttctaagcgacagatcactgaatcttcattttatgtcttttgattggagagtttagtacatttacatccaatgttattactgataagtaatattcatgccattttattatttgttttctgattgttttgtggtcttctcttcgtcctttcttcttgtcttccttttagtaaaggtgattttctctggtggtatgatttaatttcttgctttttacttttgtgtctatttgttgtatgtttgtgatttgagttaccatgagattttccagcactattttataagccattattttaagcttatcactgttatcacaacctaatagtgcttgcataaacaagcaaaaagaaaactaataataactctatgccttaacttcatcccccacattttaactttttgttgtttctatttatatcttaatgtactatgcatcccttgaaaatttcttttagttattattttcaattggttgatcttttggtctatttagtataagactagtttacaaggctgggcgcggtggctcacgcctgtaatcccagcactttgggaagccgaggtgggtggatcacgaggtcaagagatcaagaccatcctgccaagagatcaagaccatcctggccaacatggtgaaaccccgtctctactaaaaatacaaaaattagctgggcgtggtggcgcatgcctgtagtcccagctacttgggaggctgaggcaggagaatcacttgaacctggaaaaaaaaaaaaaaaagagtagtttacaaatcacagttacagtgttttcatattctgtgtttttctgtgtacttactattaccaatgagttttggaccttcagatgatttcttattgctcattaatgtccttttctttcaaattgaagaactcgttagcatttcttgtagatcaggtcttgtgttgatgaaatcattcagcttttgtctgtctggggaagtctttatttcttcttcacatttgaaggatattttcacgatatgtattattctagagtaaatgttttcttttccttcagcactttacatatgtcatgccgctctctcctggcctgtaaggtttccattgaaaagtctgctgtgagacctattggagctccattttatgttatttgcttcttttctcttgctgctgttggaatctttcctttatgcttgacccttggtagtttgattattaaaagccttgaggtagttttctttgggttaaatctgcttggtgttctataaccttcttgtattaggattttgatatctttctctaggtttgggaagtttactgttattatccctttaaactttttactcctatctctttctctacctcctctttaaggccaataactcttagatttgcccctttggggctgttttctagatctcatagatgtgcttcattcttttttattattttttcttttgtcccttctgattgtgtattttcattttttatttctttatttttttatttgactattttcaaatagcctgtcttcaagctaattctttcttctgcttagtctattcttccgttaagagactctgatgcactcttcagtatatcaattacatttttcaccctgagaatttcttgattcttttaaattatttcaatccctttgttaaatgtatctgataggattctgaattccttctctgtgttatcttgaatttgagtttcctcaacacagctacttggtctctttaaatctattttctatctttatgctttcttctttcttccctggaaggatactattatgagctttcatacccttcggctagttacttctctctttcctctttcctttgggcccagggatggtgccagctacactgctgccagcctcaggctcctgcactatccctttttggttccatcacaccctatccaccataagttgttcctttgtaaataaaccctcctctaattattctaatttaagtgttccaactgttttatattgagtccttgactgatatgggaaaattggcagaatatgaatctcctagtaccatcactgaggtgtagaatactgaaagttattatggaagagttctgagatcttagcagtatagagcattgcacagtcttattcctccattatggagaagaaggggctatttggcatgtattttctgaatttgggagcatattttaatatagcaactcatgtttgctactgtttgaatgaagaaatttcactgagcattttttaatgagacactggtcaagagtgccaagcctgaaataatcataatgtattgtgccttagaagaagatgcaggccattttcaactcattttacttctctgcagcccttaaagggtaaacaagagcatgtcagggattcctgtggctccatatgaagggtcgtggagactagcagaagggcagaaaccatcagactgcagtttctccaggctaaacaatggaacatccaacctgaaaatgacgttgggatagtgtcccgatgaaatacggatttcattctagaaggagttcttttggtagcaaagataggcatgaagctgaacattgctccaagaaaaccaaacattgcttataagaaccatataatgttcacacaggtagccagtagcagatggcagagatacatttgactacttactaagtggtttcttcattctctctttgcttccttcataggagatgtatgagaatatgagactcaaagagagagaaaaaagggaaagttcatttttaaaaaaaaagataaaaagataagccctctcctttactgtaagcctctaggttcaaaaacaggtttagcttgagttaggacaggtggagaggaacatagtttaggaaaggaggctggaggcaaggagatgagtctagaatggactttgatatggaagctataaaagaagcaatcttgaatattgaaacaagagtatactattaaacaagaatgattggaaaattgtggagttggccacgaaactgttaagcaaaccgctactcaggagaaaggaagagttattagaaaaggaacacaagttcatgtttatacttcaactcttgagactcactgcaattcccttctgacaggaatttttttttgtcttatatatggtagagttaattgttctagaagcctacttcaagctaacttaagcaacaaagtgggatttattggaaagccgcttgggtgtctcacagaacccaaggaagagaattgagctggatttcacaggacctggaaaaccctcagaaactcaattgttctctctctttcttctctctccagtcagaaccttcaggaaggggagagtggctcatgggctgagtggataaaccacaaaatgggtaatatactataggtgagttttaagtgacaaatgaagtctaagctgttattgcactggtcggtgactgaaactgaaaatgggaattagaggttaagtggagggaatatgttgccaaaatgttagaaggatcttcttcaaagagaagttgaggctctagaggataatggtagggcacagagtggaggtgaagcttgtgaggggtgggggtcaatggggaggataggagagcattcctgattttgaggaggaaggatagagggttttactggtgaatgacgtgagtaagtgtcatgaccgctcgtattctcaggattcttcagtattgggagatgtgactgcagtggacagggcagtgtcagagagactagattttataatagaagcttttaaattacctacccatcaccaacttatcaggagactgacactgtccatctcctccaaaaaaaaaaactgacctgcccggcactttgatgtccaccagttgagctttatgtttatcaagaatagttgtgtaaacttccaaaactgtttatggcaggcacagtggctcacgcctgtaatcccagcactttgggagggtgatgtgggtagatgacttgaggtcaggagtttgagaccagcctggccaacgtggtgaaaccccatctctactaaaaatacaaaaaagaaattagccaggcgtggtagcgggcgcctgtaatcccagctactcaggaggctgaggcatgagaatcgcttgaacccaggaggcggaggtggcagtgagccgagatcatgccactgcactccagcctgggtaacagagcaagactgtctcaaaagaaaaaaaaactgtttatatcagttatatttgttattgtaatgatgaaatttatagacaaactaatgaaataggagtataaacataccagtattttttaaaaataagttgaatattttatgactacataaacaataatcttttaaaagtcactgtcaatttgatgactaggagtcagccatacaactataaaaggttttgagaaaactgtaaagatctaaatagaggctgcatttagtttttttccccacaagaacctttaggttctagacatttatttcaaataaatgtcaactcatctggatgtagcttatgcaagaaagacctagaagagctcttattatggacccccattcaatgaaaacacaatggccctttatttctctttcaacatgaggaggtggaagggctgttcaagcccttctgttcacgatagcccaggaggtccaggagagaggcgagccgtgggtgagcaggagtgtctggggagtgtcaactttccattgaaaaatacccctatgatcaagccatttcacttccgtggcaatcttatttatgtattcaccaaaattgggtgggagctagtgtttagctgtcatcgtccgtaggctgctgtgtttggctcatggcagggtgtgaaactggcatcagggagtgtttgccaagtgaataagggtgaggctgccctttccagagccgccgggagaaactctggatacagagaccctagcctggcgccagtcccagcgttcctcctagtcggggaggaatctgtgggtgggaggtggggagcctgaaacccaaatacaacagccactctgggctgggcgtggttccctgggagctgggtctcagatccttttaaagctgatttctccccggatctccgggcaagatgggcaagtacacggtccgcgtagccaccggggatttgctcctggcgggctctcccaacctggtgcagctatggctggtgggcgagcacggggaggcagacctagggaagcagctgccaccggtgtggggaaaggtgagcgcggactgcggtgagagctggggccctgggactcagaggtgtcactgggggccggggccattcggagggtgctgctgccccacccatgagaaacctgggaagcggggtaggggctgaggtcgggtgcacttggtgcgcctgataggaaaagcgagaggaacaggagagatgagaggcattttcctgcccgagcggaaggacagagacgcccgctggggtgggcacggcaggcccggggggaggctggcgccccgcagtaccagctgctcctcctcacctccacctctccccggctgtgctgtggaggggaaacggagccaggattctctgaaggttcaccgaccccgccgtcctccctgaagaccccaaaacctgagctgtgtactgtcgcgcaggaggcagagtttgagatcgacgtccccctgcacctggggcgcctcctgatggtgaagctgcgcaaacacaacgtgctgttgagtctcgactggttctgcaagtggatctcagtgcagggcccggggacccaaggcgaggcctttttcccctgctaccgctgggtgcagggccacggaattatctgcctgcctgagggtactggtgagctcggtggagaaggggcacagcccctggcaggctggaggaagaagcgggtggggggaggctactgtaaaagagggaaaatgagagatgagggagatggggagaagtgaagggggagggtggctgatggggagacccgagcgcggaggggtgaccagggagggcatgtgctcttgtccctctcccccagcccggaccgtgagtgatgacccccagaacctgtttaagaaatatcgggaacaggagctcgaggaaagaaggaaggtgtaccgttgagccccaggaagtctttgatcccctaccagatcccaagaaacctgccacctgcctccttacccctacctgtgtgttcttcctccaggtggggctcctggaaagatgggttaatcctgcctatagcagggaataggcaaccggaccttcctagggacgagcgattcctcgaggataaggatttagactttaatgtctccctagcaaaagggtgagtaccaggtagaggctgggcacttgcttcctagggcacaaggtgggatgcttccttgatcttcttgcactccattctttccacaggttgaaggacttggccattaaggggacactggatttcataaattgtgtgaaaaggctggaagatttcaaaaaaatattcccacatggaaagactgtcctggctggtcagttttcacaacctcccaaaaccaatatacagacttccaacccagggatttgaaaaaggagggggatggaggattagatcagtgggattaggagttcggagctcagagctcacagggtgctccccaattgatgttcctagagcgggtttatgattcttggaagaatgatgccttctttgggtaccagtttctcaatggtgcaaaccccatgctcctgaggtgttcttcaaggctcccagcctgcctggtgctgcctccagggatggaagacttgaagacccagctggagaaagaactccaggtgctgctgggctttctgcccatccaccatcccagccattacccccacctcccttctcctcccatctccagccccttctctcatctcctccatctacacccaaggtttctcaacgttggcactattaacattctgcaccacataattctctgttggctggcggggggggggggggggggctttcctgtggatcgtagggtgtttagtagcattcctggcctctacccattgatgccagcagcatccccccggttgtgacaaccaaaaatgtgtctagatagtgctgaatgtcctggggttggggagaggaggaattgcccctgattgagaacattgatctacaacatctcctcctgtatcttcttttctttctccacattcctctcttccttcttcattgaacatatatcagccttagggaaaagcgcaagcttctggagagaaatagcaagaaaaactaaacaaagccttggagagctaaaagctgaatctgtttttggggggagatgggtagctaaaggaaatatttttgctacattggctaaagctggcagaagaggggatacgtgaagaatgcagtggccttatgtggtggaaaaccagaaacttcgctgcagggagctccaagtctgaaggaagacatcagtcatgaaaactttgcattcagttttttggttctgcagaaagtgattggtgtttaaagtaaaaaagacttgggtgggtagaggaaggatccaccctggaaaatgagagaagggcagctccagaaacaactccaaccctgttttctattcctgcccctggccctgtaggctggatctctgtttgaagtggatttctccttgctggatggagtcaagcctaatgtcatcatttttaagcagcaatgcgtggcagcccctttggtcatgctgaagcttcagcctgatggaggactcttacccatggtcatccaggtgagagggcccaggtatttttctaccagacactgatctcctttagggacttagatacacaagttctcagcccccactctctctcctgctctagctccagccaccttgacacggatgtcccccacctctgctctttctgccctcgcatccccccatggcctggctcctggccaagacctgggtccggagctctgatttccagctgcagcagttacagtcacatctgctgaggggacacttgattgctgaggttattgctgtggctacaatgagaagcttgcctagcctccatcctatctacaaggtacttcagcatctctgtcattctgtatctgactgtccttcatatttcagactcctacaaagagtctaaccttgtacatttcagtctagcagcaatcaatttatatgtggagacacatacacagatacatacacacacgcgtacacatacacagtaatatggaaacacccaggacacacacttactatgagttggggggagaagtgagaataggttttgcaaaggagttgaaattttggctgaggaggtttccaggtgggcaagtgaggggtggaacattacagccacaaagatctaaagaggcgaggaaagaagggaacatggataatggctgagattgggtgagattaaagtgtagggcatgagttgggatgaggaggaagaagaagtgggaggagatgagagaagaagccatgttacttagcggggagaagaatcaagagttattttctgaccatgtggggcttccaatgcctataaagacccatttgcacatgtcaggagggcaactggatatgtgagtctggagttcctagaagaggtgtaggttgaaaatacagattttagagtcattagaaaacaaaagtatcaaagtcattgtactggatgaagttctctagggtttgtagagaatttgaccgagatataactctagggtgaaccaacatttacagactgagagaagggagcagagtgagaaaagaaacaagagaaggaacctcattgaggtaggaggaaaatcaaaaagtgcaatccatggcagccaggaaaagaaagcgtttcaagagggacgcgtgattatctgtctcaagtgctgctgagagatcaagaaagttacagagaagtgacatttggatttctcaatatggaagtcattggttaataaatggacatgcgccatctcagggaagtggaggaagcctgattcatgggggtgagcagcaaatgtgaggtgggtaagcaaagacaacactgagtgaagatttgctgtgaaagggaaagcaagaaacagggagatggcaagacaaggatgtgggggtcaagcacaggttttctttagggtatccaatattgcacatgtttgtatgacagagagaggagaaggaatataattataggagggtgaaggcaaaaagggatgggctcatatgtgggtacctgcgaggatatgggatttttagaattcttccaaggacatgaaactgtggaaataagtgaactcctaaaactttcaccacgggatgctctgagaagacattttcccatctctatattcccaaatgttaccctgacccactccaatttaacgagaagtctctccatttcataaagacccatcctctcccttcttttctgtcacttcctttaacatcctcttccctcatggatgctgggaactctcttatttgaccatgtcccatttctttcttccataatcagctcctgatcccccacttccgctacaccatggcgatcaacacgctggcccagagtagtcttgtctccgaatggggaatttttgacctggtatggaaatggatgggtgaaggggaggatggttcaatattggaagaatcctaggggttgtttccctttcccattcctcccccaagctctccttcctccatggaaggcctctcccaaacctgcctcatgcctgaagagcttcctgcttaaaagggctagagtaggatcataggcctggagtttcctgatactcatctccctccctctgcaacttggcatggctgtgggttatcctcaggtggtgagcactggtagtggaagccacgtggacattcttcagagagccatggcttgtttgacctatcattccctctgtcctcctgatgacctggctgaccgtgggctcctggatgtgaaatcttctttttatggctaagatgccatcaggctgtggggaatcatcagccggtaggtgaaggtggcacagagaggcaatgaacggaggggcgggggactgtaggtccagaaggtcctgcattggcccctgagactgagtgtcttcttcccagggaataggtacgtggaggggatggttgggcttttctacaatagtgaccaagccatgaaggatgatctagagctgcaggcctggtgcagagagatgactgagactggactgcagagggcccaagaccaggggtgagacatggatccttccccactgaaccctgtcaacacccactcctctgcaaacaatctgcttcttctcacatcatcatgagacaccccacctgcccaaggaagctgagaattctccagagtgtgtccagaaatgctaacaagcactcctgatctccccagccctgttcctacacagtgttctctctcctctgcactaagagcttcctctggaactagatacaaaacttctcttaggtattttccctcactcttccctcccctctccccatagctcaaggttcatcccaagtgcattaacctttgagcacacacaaggtgggagtcctagggtgtgcaggccagaaccacagaaaagttcttttctgtatctccacatagctttccctgcgtgagacctatttcgtgttctggtttcgagatctctgattctcatttcaccaggattctcatttcaccaggttcctcatctccttagagtcccgggctcagctctgccactttgtcaccatgtgcatcttcacatgcacaggtcagcatgcttctaaccacctgggccaggtaacctatgtgatcatcccacaacggctcctgggatggagaagtgggggatcaaatgcccaggtcatcagcctgcatttctctgggctctcctccctgcagctggactggtactcctggatccctaatggcccatgcaccatgcagaagcccccgcccatctctaaggatgtgacagagaaggatatagtggacttactgcccaatctccaccaggcacgtatgcaaaagaccttcacaaagttccttggcagacgccagcctgtcatggtgagaagcaaatgcctgggtcctgggaaggaggcagctcaaaggaggggaagtattctgggctgagagtcccaaggggctgagccaacttgtcttctgcctctcagcatgaggagaaatatttctctggtcctgagccccaagctgtgctgagacaattccaggaggaactggcttccatggacaaggagattgaggtccggaatgcagtcctggacctgccctgtgagtacctttgacccagcatggtagagaacagcgtgaccatctgagaggccttgcccgcctcagctccaaagctccaccatccctgagtgcctttgagtattccgtcctcctcacatcctctggtgaacaaattgtccccaaagctttgtggtcagggtatccagagctgctcaccacacaactatggggaatacacagtgatggtccccattgcatttggaagtggcatcccccaaagctgccctaccttaaatgtccatccagtcctgcacttcctcaccccgatccctgcacacctcctcattgccaaaggacctggcttagatacaagtaaaaatatatgattaaataacaaaacggattatatgtgtggtggtggaaggtgggaggagagaccttgctttgtttcctgcccctttattcagattccaaagaaggaaagaaaagttttcctggaatgaaaattttttctagcaatcaatgctttttccaagggtatcttggaacctctctaagttaaatgacaagtgttctggatgactgagtccactggggctaagaaacctggctcttgacaagggtttttggcttgaggcctctctgaatcctcaataagccatcccttaggctacctgcagcaacgcctctggtgcaactcccagcacagccctcctgcatgatccctccccagctgcatcccagccttcctctcagtcctgtcccaggactcttgataaaccctcttctcatcatgctctatccttgcatccttaaaacataccatctagcccacagtcctagatactggagataaatggataaagaaggaactagtaggccagactctatgttagaaattttaaatatataatctcaatttatcacaccgggcacagtggctcatgcccgtaatcccagcactttgggaggcccaggggggcagatcatctgaggttgggagttcgagaccagcctgaccgacttggtgaaaccccttctctactaaaaatacaaaactagccaggtgtggtggcaggtgcctgtaatcccagctacttgggaggctgaggcaggagaatcacttgaacccaggaggcagaggttgcagtgagccgagattgcaccattgcactccagcctatacagcaaagagtgaaactcggtctcaaaaaaaaaaaatttatcctcacaacttctctgtgaggttggtatcactatcaccatcttataacaggaaaatgaaggttggagagataagggcagaaatgacctgggaccaaaatgcagcagagtcagattccatttgctagaaggaagcaaagcccaggattgtggtcatagcaataacagttaaaagactgatcataaaatctagaggccaatgaaagcctcggatggatctgatgtaatgggaaaaaaaggagagataaagattctttgagtcttttaaagaatcttatgcattcaaattacttatgtcccatatatttttaaaaggaacatatacaatacggttaatacggtagaaatagacatgtgtgagccatccagattcacctactgatgccctcaaccttctaatgtcccgtcctgttctgtgtattgcttccgtccatcatatgacttttttcagtagatgacgaaagaattttaagatagccacagaccatagactcacagaatctgacttggttgctagaagtttttgtggttgcatggaatggtagcaaggagagtcagaagagagggaggggatgaggaagaggcagaggtcacgctgaggttttcagttgcggcacaactggcgagaaatacaaagattcagaaggaaggttgtttaagtttgatgtaatactgtggttcttatgggaagaaattaaacaggtaattggagaggctgaactgaaaaaagaaaggaggtgagttctggctgggcgcggtggctcacgcctgtaatcccagcactttggaaggccaaggtgggcggatcacgaggtcaggagatggagaccatcctggctaacatggtgaaaccccgtctctacttaaaaaaaatacaaaaaattagccgggcgtggtggcgggaggctgaggcatgagaatggcgtgaaccgggaggcggagcttgcagtgagccgagatcgagccactgcactccagcctgggcgacagagagaaactccgtctcaagagaaaaaaaaaaaaatggaggtgagttctacagtttggatgacttaggagctgaatttatgaacaagggaaaaagaagaggcagagggccaaggtgtccttggccctaacaagaattagggatataaaaaagaacatgaggccaggaacggtggctcatgcctgtaatcccagcactttgggaggccgacttaggtggatcacctgaggtcaggagttcaagaccagcctgaccaacaaggtgaaaccccatctctactaaaagtacaaaaattagctgggcgtggtggcacgtgcctgtagtcccagctactcgggaggctgagacaggagaattgcttgaacccaggagttggaggttgcagtgagccgagatcgcaccactgcactccagcctgggcgatggagcgaaacttgtctcaaaaaaagaaaaaagaaaatgaagccaggaagtgagaatgatcctagtttgaaaggtaagaagaaaagctggatgatgcaggtcacggaagccctgtcatcacttcctatgactgggttgtctccctgagctctctcattttcttttttcttttttctttttttctgaaatggagtttcactcttgttgcccaggctggagtgcagcggcacgatcttggcttaccgcaacctccgcctcccaggttcaagcaattctcctgccttagcctcccaaatagctgagattacaggcatgtgccaccaagcctggctaatttttgtatttttagtagggatgaggtttcatcatattggtcaggctggtctcaaactcctgacctcaggtgacccacccgcctcggcctcccacagtgctgggattacatacaggtgtgagccaccacacccagcggctctcccattttctagatgtgtcacctcactcccattttcctccccaatctactccccatcctcgtgtgtttcctcagcaagtgtccccatctctgcacagcacagtcatatcctcagtccagctttcaaattctcccacctcatctctcaggagggtctgatataacgactcttttactcagataatctgttcaggcacctgtgcctatgagaggcttactgtgatctctgaatctatgtttgtggtaatcctacgtggactgctcacctctagatgtcttatgaaatcacctccccttatttctacaacaggctcaaattgccttcgggaatcattaaagctcagtgttctggctttgattggtccttcgctccctagtccgcctgcactcatgtagggtcatgctattacaaaactccacagggtaccatttatgttgtattccatgtggaaggtgtcctctggagtttggcaatatagcagctgtctgtaaaaatgatattgaaagcatcctgagttctggagctgcgccgattctattaggctgagaaccccagtttcaagttcatctcttcatttttctctcattccatttcacagcggcttaacagcaggtcctttgtattcgtttctggcccatagagggatctttattcaaaatcacagggttgtctctaaatttctgctaagctaatgaatggtgttagtatgttctcttctccagggcagaggcagagttttttttttttttaattagccaaaagcaacattacacaataaatcacatatcattgtagaagagaagagttaactattataactaaaagataaaatgccatggcattcaggcaacggtggattagaagtacttcgaacctatcagttctgtaaagcctagcttaagtctgttggtctaactttctaactagacttaccttcctttagaaaatatttgatgtgcagagagctagactgaggatctagcagtcacagatcaccttaattcaatcaggaactaagattatttgatgctgggttttaacccctttaaggcctgaatttccaccccacctttactgctagggtgcagctctttgaggtcccaacccaaagtgggtgagaaagagacagagagagagatacagggatggtcgagaatccttcaaagacaacatcagccacagattaaagagaaatcttcaatgtggagaaaaatctcattactttcacatgggcatcaataatacaggtagcattttctcaaatgaaacattagctgccagagacaatgaataatcttggaagtgttgaaagaaaatacctgccagactagaataaagactttctacaaatcagtaagaagaaataggcagttcaataaaaaatggacaaaaggcctggcacagtggctcatgcctgtaatcccagcactttgggaggccgaggcaggcagatcatgaggtcaggagatcgagatcatcctggccaacatggtaaaaccccgtccctaccaaaaaaaaaataataataattagctgggcatggtgatgtgtgcctataatcccagctgctcgggaggctgaggcaggaaaatcgcttgaacccaggaagcagaggttgcagtgagccgagatcgcgccactgcactccggcctggtgacagagcgagactccatctcaaaaaagaaaaaaatatactcaagacttaaacatacatttctcatggggacatccaaatgtcagtaaatatacggaaaggattatatttgatgattctatttgtcagtttaatatcacatcaacttttatggtatctggaggaattgatcccattctgggtaagtctgatgcccgtatggctcaattcgttgcttgtatctctggctttggttactgctccagagaattgcctgattccatactgcatgaagttttaagatatttgaatactagagaaatttccaaacctagcaaaagggtcctgtattatacaaatcttacagaaatctccaaggcctctcatcacatctccaggagatctacatctgtgtctcttatatgtggccaaagaggctatccttgactaactctgggtcactgggatgcctattttccccataccaccttattatttggatactttaccagaacgggtaggaagtctgctggtcagatatagatcatagttatcacagtcaacagcagtctatgtggattcttggtggcatttgacacagccactttcactttgcttaaatacttttatctcttactttctatgacatcatagtctcctggttgtccactttccttaatggttctctgccatgcaggtacccattccagggagtccctggttcccaaagtcatcctgattttcactcacaagctacccttaatatttaaacaaataggctggaaactctgtctctaggcttttgggaagggcccataggagaatgactgggtttctcattaattgattagaaggtacattgttaaggtaacagctgctgtaacaaatcagcccaaataaataatggttcaaagacaatagttgttcttttgtttcactcctgataaatttaaaacaatggttcctaattggtgcgtagtcctccttcactaagttagggactcaggctcccttcatcttgtggctctgcatatttaacatgtggtcaccatacttaagaacatttaggtagcaaaataagagagaacataaaagatgacatgtgtgatatttttatgggacacacacatagcaatcagaatccctggcaggaaacagttggcataatcaaagtcagtgtttgtttgtaaatctcttttattttctctaccataaaaattgctattgttattttatattgatatggattattgttatatttttattgtgaattattccctctagccttcaaaaggctgggcgtggtggctcatgcctgtgatcccagcactatgggaggccgaggcgggcagatcacgaggttaagagatcgagaccatcctggccaacacggtgaaaccccgtctctactaaaaatacaaaaattagcttggcatggtggcacgtgcctgtagtcccagttactcgggaggctgaggcaggagaattgcttcaaacccgagaggcggaggttgcagtgagctgagatcacgccactatactccagcctgggcgacagagcgagattccatctcaaaaaaaaaaaaaaaaaaaaacacgtagccttgctttctgctctgaattctataatgtctaatttttttttttttttgagatggagtcttgctctgtcaccaggctggagtgcaatggcatgatctcggctcactgcaacctccgcctcccgggttcaagcaagcaattctcctgcctcagcctcccaagtagctgggactacaggcgcacacgaccacacccagctaatttttgtatttttagtagagacgggttttcaccatgttgaccaggatggtctcgatctcttgacctcgtgatctgcctgctttggcctcccaaagtgctgggattacaggtgtcagccacggtgcctggcctataatatctaattttaagattatgagtgatactttttttgtctgttatacatttgcccatccttttattttcaacttccagaattagtttattttaaatgtaccttttgtgtatagtagacagttgggtttttctttgtaatctaatatgaaaatatttttcttgtaatacatgctatgttcatttacatcatttacatctattgatatgctctatttttaagtttttcatgtgattttttatatatataaattataatgttttactctgtggcttcttattgcagttagactattcaagaaggtttataattttgatctagcaataatctttatagtttctatttgatataaagaccttaatctcctcatttaaaatatttcttagtatgagcaatgatgaaattggcttgtagatatttcctccctctcatcaccaaatttttattgatatcttttaaaaatttattcttaaatgtgtgtgtacttctactacctgaattgtcattattaaacaggcaatagttgtgtactagagttctctagagagacagacccaataggatagagagacacacatatagattacacacacagatatatatataaatatagatttatagatacatatacacacacatacacatatatgaggggggttattatgggaattggctcatgtgattatggaagctgagaagtcccacaacaggccattggtgaactggagactccgggatgctggtagtatggcttaatccaagtctaaaggcctcaggtctagggaagctgattgtgtaattcttggtgtgaggccaaggtcctaagaacctgtgaagctgctgatgtaagtcctggaatccaggctggcaaacctggagttctgttgtctaagggaggagatgagtgtatcccagctctagaagacatgtttgcccttttcttgatttatcataagtattttaaactcatatggaagtgtttggatacatgttttatttgctccttagcaacatatttctggtgagttggttttttttgtttgtttgtttttgagacagagtctcaccttgtcgccaggctggagtgcagtggcgtgatctcgactcactacaacctccacctcctgggttcaagcgattctcctgccccagcccccagagtagctgggattacaggcacccgccaccacacctggctaattttttgtattttagtagagagggggtttcactatgttgcccaggctggtctcgaactcctgagctcaggcagtccacccgcctgggcctcccaaagtgctaggattacaggcgtgagccaccgcccctggcctcaagattgttcatcacatgtgcaaagtctctttaccatgtaagaaaacattcacaaatgctggggattaggacatggacattttctacctaccatgatatccatcaactctgaaagtgtccctgtgcccttttatgaccccttcctatggttccttcctccctgcattctgcacctatgaccccaggcaaccactgatctactttttgtcactataaattagtttgcatttcctcaaattttatataagttgaattataaaatatgcagggttttttatttggcttttttcactcggcaaaattattttgagatttatctttgttgtgacctgtgtccacagttcactattcttttctgttgagtagtgttccactatatgtatatactgcaacttaagaaaaatctgccacttgctgatggacatttgagttgtttccggtttttgactcttgtgatagtcaaaatattgacatatatataaattataatacagctgctatggacatttgtgaacaagtctttgtatgggcatatgattttatttctgttgggtaaatatctataagggaaataatttgcttggggatgactggttcacatggtatatgtgtgcctaacttttgtagaaactgccaaactgtttcccaaagtgtctatatctgtttacgttcctactagagttccagttactcatagggtggtggccactggattagttttcatctgcacttaccagcagcaacagcagtggcaccatggtaaggtgaatgctccttggctgcggcaggatgctagtgggtgctggggtaccagcctccatgcaggcattcatagcagcaaaagaggtagcatggcttgggcggcacaagggtcttctgccagtgaccatgcatgtgtttgtggcggtggtgttagcatggagacagggtggtgttgggagcaggactgtgtgtgcagttgtgtgtgtgctcacatcggtggtggtggctgctcagggaaggggtgggattcgctgttctccatgcctagctttgtgccagttgcagttttggcacagggccagggcactgttggtagcagagctggtgtgttccatgcccaccaacactgacaggtatggtgaggggcaggagaacggagtgtattcatgccagcagcagtggcatggcagggtgtgcacacatgtgcactggtggggaaggaaaggcaaagtttgcctgtaaacacatgcagtggcaaagcaatgtgggtggccacaggtgagtgtgtacagagaaagctgcatgggggaggctatagttaagggagggcaagggtagcctggtgcatatctgtgaaggctgctctgctggatccatatattggtcaggcatggtccaccagcacaggagctatgatgtgggcccccaaggaggtatctgggagctgcactgcaggcaggtgcagccaggctggggctctgtgagacgccagcagaccaagggatgctgaggtcaaactggtcctgtctcatgggcaacaccacccttcagagttcaggtctgactgtgcccctagggctaaagtgtcctatgggagcaagtcaagcctagggacatgggtttccctggctgtactccagtacagacattgttgcaccgaactctctgggctctgcaccagcaggatttctgcccctaccccttctctagacatctcttcctgccaactcaagtatatctggtggttgagagctctcctcttgttgggattctggaggcccatggtgagggtgggctgctccttgcctgttagactcaccccttccacaggaatcagtgggggccagaatgagtcctggtgtgcagtatccctgttcagggttcccagcttcctccccttcagcccagcctctgtgccttccctctgtccactctcaatgccttccctctgaagatctgctaggagtgcaccagtcttcctgatgtcttggtccctcactgggagatgtttctactggctgcatctagtaggccatcttggagcagcaatttgcatgttaaggctcagactgtttgtttgaatgcacacagaaaagaaaaaaagaatgaaaagaaattaaaaacacctactagatctagggaaaagcctccaaagagcaaatgtaggagtcattggaatttgagagggagttgagaaatagcaaggtgtagaaagttattccaagaaataatagcagaaaactttctaaacctagagaaagaaataaatatacaggtacaggaagttcaaatatcaccaaatagattcagatccaaataagaccaccccaaagcatataataatcgcactctcaagggtcaagaacaaagaaatggccaggcgcggtggctcacacctgtaatcccagcactttgggaggccaaggtgggtggatcatgaggtcaggagttcaggaccaacctgaccaacatggtgaaaccccatctttaactaaaaatacaaaaaaaaagttagctgggcatgatggcacatacctgtaatctcagctactcaggaggctgaggcagaagaactgcttcaacccaggaggtggaggttgcagtgagccgagatcgagactccatctcaaaaaaaaaaaaaaaaaaaaaagaacaaagaaaggatcctaaaagcaacaagagaaaagaagacaataacatgataacatgtaaaggagctctgatttgtctggcaacagacttttcatcagaagccatacaggccaaggcagaatgggaaacatattcaaaatgcaaagaaaaaaacttttttttttttttttttttttgagacagagtctcactttgtcacccagactggagtgcagtggcacaatcatggctcactgcagcctctattttcctgaagcccaagtgctcctcccacttcagcctcccgagtagttgggactacgggtatgagctaccaagcctggttaattttcaatttttatagagacaaggtctcccaatgttgcccaagctggtcttgaactcctgaacttaagttttcctcctgccttggctttccaaagtgctgggattacaagtatgagccaccacaactggcaggaaaaaaactttcagtcatgaatactatatccaagaaactatccatgaaacatgaaagagataaagactttcccagacaaatgaaactgacaaggttgatcatcagcggatctatcctataagaaacgctagagggagctcttcattctgaaagaaaaggatcctaacatgtaacaagaaaacatctaaatgtataaaactcactggtaaaagcaagtacatagacaaatagacaaatactctaatactgcaatagtgatgtgtaagctactcctgtctctagtttgaaaattaagagataggcattataaaaaatgtgagttgagacaatgaaaagtcaaaatgtagggagatggagttaaagtgtaaagttttcttcagtttttctccttttctttgtgactaaagttaattttcatcttaaatgacaactggttaagtttaaaataatgtgttataagatgttttctgtaagccttacaatagccacaaagcaaacacctataatagctacactaaaaataaaaagcaaggaaattaaaacatactaccagagaaaatcacttaagcacaaaggtagacagtaaaaaagaaagtaagggagagaggagttgcaaaatgaccagaaaacaactatgtaatatcaatagtaagttcttacctatcaataataacattaaattgactaaatttccaaattaaagacagagtggctgaatggattaaaaaaaaaacaagatccaactatattttgcctacaagaaactcacttcataaagatgcacataggctgaaactaaaggaatagaaaaagatattctatgcaagtggaaaccaaaaaggagtaagagaagttacacttagataaaataaacttcaagtcaaaaactgtaaaaagacacaaagaaggtggattaggccatttttgcattgctatagagaaatacttgaggctggataatttatgaagaaaagagagttaactggtacacagttctgcaggcttcacatcaaaccccacagactggtacatcccaagcagaaaaaatgaacataaatctataactagacacatcagagtgaaacttcagaacaccgcagatcaaaagataatctggaatacaggcaaaaaggaaggaaagatcacctacaaaggaaccagaattagcacaacaacaaaactcccaacaacaacggaagccagaaaataacagaatcaggtcttcggtgtattgaaaaaaattattggtcaaccaagaaatgtgaactcagcagaactctaaaaaaaatggtttcaatcattttttaatgagaaaatttacttctaaagaaagacctgcctcacaaaaacttttggtaatgtgctcagaaagaaaaggaaaaataatactataaaagttatctgagatgccaagaacgtggtaatatgtaaagaaaccaaaagcaacagtgtcaggttgaaacaagcatgctttataatttgtagtatttttttaaaggcagatatgctggttcctctctgccactgaatgtaacaatgaagacctgggcagaatgcgtgaagcagcagtatcacgggggttggagtgaaagcagaaggaaaactagtaatcagcttactagattttccctgcagaactcctagactgacttcaaggcagcctaaaacctagaggtgcaagtcagcatggacagatcaagctttagggaaagccctcagttctgggataagggagtgataaaggggtctcctggaaatgacaacagcagcgggggccgataagcacgtgcagtctgaagaaggggaatcttcctctccaatcagaagaagtgtggtcccaagagcgcggggaacacctccgtggattttttttcctctctctttcctcttatcacttgaccccgaatgagggcacagatgcaagaagtgtacagcaaggtaggctaaattaggccctaaatttctggctgaaggaccaaaaaggaaaatgccaggaaactgaaaagcacagaggagatcacagggagagaggagctcaggaaggaaaccccaaaatattgtttataagctcaggggctcattcctaaactgcacaaacagagattagatcacggaccaaactactaaagactgagagctgaattcagagatagggtcccatccaggttcctaactgggtggcacatgcatgggctagatccaaatagcattgcaaaggcctggaaaacagaactagaattgaaaccaccgcggaagactcattcgaactcgtgggctgaactcaaccaggtcaatgcttcagaaaaataccagcattctccacaggacataaacaagattgtctcataacataccattcaaaatattaggatacaatccaaaattgctcatcataagaagacaggaaaatctcagttcacatgggaagagacatagatgactatgaagagaagttataaaatactccaagtcggggcaaacactgttgaaaaggtagaagacctcaggaactaaatagaaaaatataaaggagaaccaaatgaacatttcagaactgaaaaatgcaataaggttttttaactgtttctgtcaagatggcggatgagaggcattgctggcacgcctctcccacgtggaaggacaaaatagtgtagagacattcactttgtgaacttttttcaagaggcgatgcagtcattgaacaggaaaacccagggacgctttgaaggacgcaggaggctgcagtctacactgtgagtcaggtgaaggactgtgagtcccagagtgtgagaggggaagagtttttgcctctgggatacacacccccaccagggaccctgaaagtacaggacacggaggaaggccctaaccccacccagcaaagggaccaactcggggagggtggcggaatataaaaataggagcagtggcagaagacacttgcgtgcactcccaaatcccaacacaggagggcagccgttccttactgttcctcacaggggacccccgtggaggacaggcaaaaagtttagacggcggtcgcaggttgaacgaagctcccgaggggtttcatgatatatatacataaccttgggtggggaccaactcccttggccagggccaggcgtgggagagtgaaaagtgggctgcgagtgcagggggccgtgagtgcggaagccgcgggtgcaggaacctcgggtgccggctttgcaggacagggaagggtgtggcgtgaaaaccacaattgcgatctcccgtggggaaagcttataactgtggcaagttccgattacagactggctggaattcagctcgccgctgccagtggaagctgtggtagtagatctgcctcactgagtgcatgggaattgggggctcaccgctgcctgctactccccactctgcacaaactcttctgcgcagcgggggcagaagaacatcaacccagtggcctgagacccactccatcccccaacattcacaggagctgctgcttgccctgcacacggagaatcagagcacaaacctgaccgacgcagcccccatctcgctttgccccgccacttgccctggtagcttaacacaaaggacagaatctcttgagagctctgtggccctgactattgcctgtgaaaccagagtattcctccctccacgcccccaccaccacgcccctcccccccccccccccccacacacccacctaccgcagccggtgttcatttgcaagcaccacctcctggctggaggccaaccagcacagtccattacagcatctcctggtagaataacattgcacccaggaagaaggaggctctatgatctcagctattaccactgcctgcatcactccggctaaccaggaggtcctgagtccacatgaccagctcattactactataactagcattcaagaaagccaacatactatggctaccaataaccaaggaatttcagagtctacgtcactcccctgctacccccagtagagctggtgttgctacccacttctgggaaactggcattcacaactggcatttcccaacaccagcctggagggtggcaacgtcactgggcagctagacccagaggagcaacaacattcacagtagcgtggctcacagggactcccactcatagggaaagggggagtgcgccccatcaagggaagaccctgtgggaccaaagaatcgggatggcaggccttgagcatcagatccttccgctggtggaaagcttccttgagcagaggcgcagctgaagtgctaggctcagcggggaaagccttcagctctatcgcaacagtcagacagctttggtgcatgggaaggatcttggagaagaggcagtctttccccccttgttcaccaccatatgcacagttgggacttctcccacaggagctcgacatggatgcaactatagacggccattctggaacacatcaaggcgactgcatccccacaagaggagcaccctccaggatcaggcttgcacaagaaacagtcacaattcctctctatttggaacaccaacacctacagatgaaaagaggtgcctgtctgatctgaatagccagagcgctgggacaggagcatatctaagaagtggaaaacgtccctgctgaccttgcaggggagctaaggtggctccaacccttctccctgataagacctcactgtgactcaccgagggctcctccagccacctctgtcaagcctgggtcttcatttacccacttgctttacccacaaccgattcctactcagggacacctcttctactggcctgaaacctgaaccatcaaaccagtaaataaaatactgggggaaaataaataaataaaaagtgcatgagatgggagaaggagataagctttaagaaacctctaccattccaaccccctaggagataatggaatggaaaaccaaacactgtatgttctcacttataagtgagagctaagctaggaatacgcaaaggcatacagagtgatataacggactttagagattcagaaggagattcaggagggtgggaagaggaccaagggaacaaaatctatgcattaggtacaatgtacaccattcaggtgacgggtgcaccaaaatctcagacttcaccgctatataattcatccatgtcaccaaaaaccacctgtaccccattaataaattaataataaaataaatttttaaaaaaagttttagctcactgagtgagcttgcagcagaatggagacagcaaaggaaacagtcagtgaatttgaagatagctcaatagaaactatgcaatttgaatgacatcaagaaaaaattgtttaagtaaatagagtctcaaggacatgaaggacaaaaccaaaaggtctaacattcatgtcatcagagtcaaagaaagataagagtgtgtggtgcacaaaaaaaataaataacgacttccaatttttcaaatttcataaaagatataacttacagcttcgaaaatctcaacaaatcaccaacaggataaaacaaacaaatcctcatccagataatcacaatcaaactagtgaaaactaaagccaaagaaaaaaatcttgaaagcaagcagagaaaagcaatgtatttcccatagagaaataataatttgaatgactgcagggttctcatcaaaaacaatggaggccagaagattcatctgacaaagcactaatatccagaatctacaacaaactcaaacgaattagcaagaaaacaacaatcccatcaaaaagtgggctaaggacatgaatagacaacaattctcaagatatacaaaatgaccaacatatgaaaaatgctcaacatcactaatcaggaaaacacaaatcaaaaccacaatgtgataccaccttactcctgcaagaatggccatcatcaaaaaaatcaaaacataatagacgttggcacggatgtagtgaacagggaacacttctacactgctggtgggaatgtaaactagtacaaccactatggaaaacagtgtggagattcacagagaactaaaagtagaactaccattcgatccagcaatcccactactgggcatctacccagaggaaaagaagtcattatacaaaaaaggtacttgcacacacatgtttatagcagcacaattcgcaattgcgaaactgtggaaccaaccaaaatgcccatcaatcaacaagtggataaagaaactgtgatatgcatatacacatacatacgatggaatactactcagccataaaaagcaacgagttaatggcagcaacctggatgcaactggagactattattctaagtgaagtaactcaggaatggaaaaccaaatatcctatattctcactcataagtgggagctaagctatgaggatgcaaaggcataagaatgacacaatagaatttggggactcagggggaaagggcgggaagagggtgaaggattaaagaacacaaattgggtgcagtgtttactgctcaggtaatgggtgcaccaaaatctcataaatcaccactaaagaacttactcaggtaaccaaacaccacctgttccccaataacctgtggaaagaaaatttttttaaaaaaagaaagtagaataatatttttaaagtgctgaaagaaaagagctatcaactcagaattctatatccagaaaaaaatatctttgagaaatgaaggtgaaatgatgacattctcagatgaaaagaagaaaaaaaaactaagacaatcaatttccagcatatgtaatctaaaagaattgcttaagaaatttcttcagacagaagggaagtgatgtgagaaggaaacctggaacacggggaatcaagcgagaacaacagaaacattaaatatctgggtaaatataacagactatccctctcctaatgagttctttaaaatatatttgatggttagaagcaaatattttaacatgactaaaagatttttaatatacacagatgtgattaatgggctgaccatctgagttcatctgctctcagccaaaaaaataaccacggcttctccctctgctcagcatgtcttttctctaccatgaggttctacttctttgtaacttctgttccccatggccatcttggcccctctggcttctctccgtctttgttcctattgctaactgcctgatcctctctgtattttccagatcaacacacacacacacacacacccatagtgagaaactgaccctgctcttttgtctggggagtggtcccatccaagtacacctctgactgtggatggggcagatttccttataaggggatggcaggtattatgatcgccatgtagaattcagatgcattaaacattttgttattctgagaaccatgccacacatttacacccctctaagccttgatatggtctattccttcttcctgggatttcttttcctctttgcctagaaaacttgtacatatccttaaaaatccaacacgagggctcagtcactcctcctttctcttcagtccccattgcccttacatccaacctctattcaagtatttaatatgctctttggacactggttgtctatacatttgtcgccccaaccagacagcttgctcccaaaaggaggcatcaggagattctcattactatattcctactgcccattaaccgttatattcattcatgtcttgtcatccattcaacaaatattaattgaatgtccactgtgtgtcagcctctgtatgaggcactggaatgcaaacgtgaacaagtcagagtccctgccccctcggagattagcgtggaccacactgtgtctggcacatagtgaatgttcagtaagttatttttaagttggatcgtacttgcttatagttctctaccaaggagccctttgacctttctcagacatcagagctttcacagatgaaaaggagtggaaagttaagtgggccatgattcccaaaagcacctcagacttggttatcaaaaaccaagcaactcttctagtccttatgtgtcccacatctcagcaaatacacacacatcatatacctagttaccccagccaagaaccagggagtaacaatgaccaatctttccttctcttctgctctctctcacacagtctactctttctctttctcttcctgtcatcaccaattaaacaatggagtcctgaccgctccacttccttcgcatgtcttccaccctgcccgtctccattcctgcttcccctgcttgctgcaggcctttattatctctccccagcacaccaaagacgtctcctcatgggtctcctgttttctgtgcaaccacatcactcatctcttcctgacccaaaattcatgaatttccctgaaatttcatcagctccctgcaactcttgctgtctgtttgcccagaatgcctaccctctccccaactgtccttcattcccatcaacccggtagatatctacacagatttaaagactcagctcaagttgcctccctgagaagccttttctatctcctcgaggtgaacctatccctccctgctttgtgcccccataataccccacacgggattctttctccattgtaacacactgttgcatttactttttatgtctttgtttccccccactagactaggaactccttgagggaaaacaaaatctctatgttctcaatgcctggtgcatagtatatgctcaataaatacttttctgaatgaatccagtaaacaaaatacttccctgtctttggcctttgtgaaacaagcagctagaccttccaggacgggcttctttgagcctctacaagagtcaaattaagtaagtaattcactgggttgtctgcctttgtagatctgaggaggccaaactccacctaattttccctaccctgaggcccatctggttctcacccaacaacttcatgagcacatccagatggtccctctaacatgagcactgccaatgacatgtaggacagtctcacacaatctcatactcgtatccctcttctgcgatcttaatccccaaacccaattttgcctctcctttaaccctgtgtccccaccacagttttatccttcatccattcctataacatgtcccctgtttattccccaaactttatcttcttgccttcaaaccttcaacctatgcataagcataatcattctacataaaagctattgagactaggcatggtggcacatgcctgtaatcctagcactttgggaggacaaagcaggaggaatgcttggggccagaagttcaagaccagcttgggcaacatagccagacccccatctctatgaaaagttaaaaaaaaaaaatggtagccaggtgtggtggcctgcacctgtagtcctagctacctgggagactggggctggaggatcccttgacccaaggaattcaaggctgtggtgaactatgatcatgccactgcattccagcctaggtgacagagagagaccctgtctctcaatatataaataattttttcaaaaagttattgaacatctatgatgtccagatcctgtgccaggcactgaagataaatagagaaatagaaggtaaatagagataggtagagtctctgcacaggggaaactcagggaggccaaagagataatatataatatgtaaataccaacccagtctatcaataagcattggcctcaggttttggaagggtcagttccatggactgtggaggtggtcaaaaaatgctttgtgtgtgtgtgtgtgtgtgtgtgtgtgtgaagatggggtcccactatgttgtccaggctagtctcaactccagggctcaagcaatcctcccacctcagactcccagagtgctgggattacaaatatgagccaccacgcccagctaaaagaatgcttcttgaaagagacagggcttgactgggatttgagctgggaaaaaagttcttcaacaagttcaaaaaaaaggagatcaaaatttcagattgagttagtggctcaaggaaagacccaggagtcagcaaatgcagtgttttaagagaccaataactaaatgatttgggctggagtggaacacgggcgtgggaagagcaggaggtgagtctaggaagacagtttggtggtagacggtgggaggtataattaccaggattagaaattgggacagtggcaggtaagcaagaaggtgaggaattctgtgttcaggaggaagaggattaacacgtaaatagcattttataaaggttcatgtggcagctgtaaggagatgggttggagtggggacagattcatggtaggaagtctatcatgatctaggtggtaaaatagactgaaactatgggatggaggagaaagatattacaggagaagaaccagttagagctggatgttaatgagaaaagtcaaggataaggccaatgttttgagcccatgactttgggtatacacaaatgccagtgataaaaaatggaaagcttaaagaaggaaactgagacaaatgactgactttggtcgtcgacaaatctttatgagcagtggtgggtatgagataaaggaagagatgtccagcaagtaatggcaaatccagacttggaacttttgagagaagtcagatattgaagaggagatgagggagccacctgcgtggaagaggagacctgcaagagcaaaggatgtggagggaagagcaggactgagccttgagatccgccttttcaggaggaggaagggggccaggcgccgtggctcatgcctgtaatcccagcactttgggaggccgaggcggatggatcacctgaggtcaggagttcgagaccagcctggccaacatggtgaaactccatctctactaaaaatacaaaaattggctgggcacggtggctcacgcctataatcccagcactttgggaggccaaggcaggtggatcatgaggttaggggtttgagaccagcctgaccaacatggtgaaaccccatctccactgaaaatacaaaaaaattagctgggcgtggtggcgggtgcctgtaatcccacctactcaggaggctgaggcaggagaattgcttgaacccgggaggcagaggttgcagtgagccaagatcgcaccactgcactccagcctgggcaaaggagcaagactctgtctcaaaaaaaaaaaaaaatacaaaaattagccaggtgtggtggtgcacgcctgtagtcccagctactcggaggctgaagcacaagaatcgcttgaacctgggaggcagaggttgcagtgagccgagatcacaccactgcactccagtctggtgacagagtgagactttgtctcaatcagaaaaaaaaaaaaagagagaaggaaggggaaagaatagagagcccacctggaggttaggaggagaaccagcacagggacgaagcagccagtggcagagagaggttcgaggcttaggaggttggtgttgcctggtatcctgtaagtttgtattcttatggtttgtatgcacaggaagaaagcatgtgaagaaatacaccagattgttaggagcagttaaaaaacaaaaagcaaacaaaaaagtggtgaaaaggagctgaggatgttcccttctattgtccatgaatttttacaattagtagtgattattttaataattatccccactgccacgccagccaaaaagcagtggtgacaagtcactttgctctcccacatctctctctctctctctccagccatgcctcttccctccttctcagcaccccgtctctcccccagcacacccctaatctttccactccaggctttaaactctttgacatagtttcctccaagtgttggtcagctactctttgtggggagaagagtaaactgtcccaggggccaacataaaaagagagcttgtttctgcctctaatgttttgttcatggtggttcccgtacctgttactttccctccacttattgtttccagcatttttttttttttttttttttgagacagagactcactgtgtcgccaggctggagtgcagtagcgcgatctcggctcactgtaacctccacctcctgggttcaagcgattcttcttctcagcctcacaagtagctgaaactacaggcacatgctaccacacccatttaatttttgcctgtagtcctggcaactcaggaggctgaagtgggaggatcgcttgagcctaggaggtggaggttgtagtgagctgaaattgtgcctgtgcactccagcctgggtgacagagtgagaccctgtctcaaaaataaaaatagtaacatacaagagtggtttcttagttatgacaattgaccagtcatgtgagatgagaacatcaggagaagcaaactgggggaggggaatacaagaactctctgttgtcttcattaattctctgtgcgtctaaaattattccaaaataaaaagtttattgagaaaatacattagcaacatggaaaatgcttatgatataatattaaatgaaaaaaaggatgacaggtatctgctcagggtaaaaaagaagataaatggggagagaaggaggaagtgagagttggcttcctcctacctgtcccacctcgtctcaactccctgattccattcttgctgatgcagccgcccaaaggagtatctgccactttatttcctgccagttcaaatcccatcccatcagctctcattaagaaaccctttccggccgggcatgatggctcatacctgtaatcccagcactttgggaggccaaggcggacggatcacctgagggcggatcacctgaggagttcgagagcaggctggccaacatggtgaaaccccgtctctactaaaaatacaaaaattagccgggcatggtggcgggcacctgtaatcccagctactcaagaggtgaggcaagagaatcacttgagcccagggggcagaagttgcagtgagccaagatcaagccattgcactccagcctgggtgacagagcaagactctctctcaaaaaaaaaaaaaaaaaaaaaaaaaaaaaaaagaataagaaggaatagaaaggaaggcagagtactgatgacatctgatccagccacaccttaatcctattgacctcagacttagctctatgagccaataaatccccttcctactttatttttgaaattgtaaattgataatttataattaaatttatgggatacaaagtgatgttacaatttatgaatacaatgtggaataactaaatcaagctggttaacatatccagtacctcaaatacttaacatttttgtggtgagaacatttgaaatttactctcttggcaattttgaaatgtacaatactctattattaactatattcaccatgctgtgcaatagaactcaaaagtatttttaaaatcctcctgtctgactaaaatctgatgccctttgatcaccatctctcccttccccacaacccccagcctctgtaaccacaattctaccttctgcttctgtgggttttagattccacatatatgtgagaacctgcagtacttgctttcctgaacctgacttaattcacttagcataatattctctaattccatctatgttgtcacaaatgtcagaatgtctttcttttctgttgttgttcttgttttttttgtttgtttgttttttgagactgagtctcactctgtcacccaggctggagtgcagtggtgcgagctcggctcactgcaacctccacctccccggttcaagtgattctcctgcctcagcctcctgagtagctgggattacaggcacccaccaccatgcccagctaatttttatatttttagtagagacggggtttcaccatgttggccaggctggtctcgaactcctgacctcaactgatccatccatctcggcctcccaaactgccaggattacaggtgtgagccaccatgcctggccgagaatgtctttcttttttaaggcttcatagtattcctttctgtaagtatgcaacattgtctttatccactcatttgttgatgcacagttaagttgattctgtaacttgctattgtgaatagtgctgcaatgaacatggggtatagacatctcttcaacaaactgattttaaacctttttggtaaatacccagaagtgggatttcaagatcatatggcaattttatgtttagttttttgaagaacctccatactgttttccatattgactatactaatttatattcccaccaacattgtacaattgttcccttttctccacattcttgacaacatttatctttcatatttttgataaaagccattctgaccagtatgagatgatgtctcattatggctttaatttgcatttccctaatgattagcaatatcgagtatttttcattatatctgttagccatttatatgtattcttttgagaaatgtctttatctctggaatgcaaggagggttcaacatatgcaagtcaataaatgatatgccacattaacagaataaatgacaaaaatcatatgattatctcatcagaagcagaaaaaaattgacaaaattcaacatcccttaaccataaaaacaatcaccaaattaggtatacaagaaaggtagctcaacaataaaagctatccagagatgctgacagctaacagtgactcagcagtgaataactgaaagcctttcccccaagatctggaacaagacaacaatgcccactcaacatggaattggaagttctagacagagcaattaagcaagaaaaagaaattggcaatagatttaaccaaggagacaaaagacttatacaacgaaaactataaggtgttgatgaaataaactgaataagacacaaataaatggaaagatatttcatgttcatggttcagaagaactaatattactaaaatgttatactacccaaagtgatctacaaattcaatgcaatccctatgaatatcccaacatcacttttcatagaaataaaaaaaaaatccaaaacttcatatggggctggacatggtggcttacacctggaatctcagcacttcgggaggccgaggtgggaggatcacctgagatcaggagttcgagaccaacctagccaacatggtaaaaccccatctctgctaaaaatacaaaaatcagccaggcatggtggcactcacctgtaatcccagctacttgggaggctgagggacgagaatcacttgaagctgggaggcggaggttgcagtgagccttgattgcaccacttgcactccagtttgggccatagagtgagactccatctcaaaaaacaaaacaaaacaaaaattcatatggacaacaaaaacctcaaacaaccaaggcaatcatgaacaaaaaggacaaagctggaggtatcacaccaccagatttcaaagtatactacaaatctatagcaatcaaaacaacatggtattggaaaaaaaaaaaaaaaaaaagacagacacattgactaatggagtggaatagagagcttggaaattaacctactactatacagtcaattgattttcaacaaaggtaccagaatacgcaataggaagaggacagtcccttcaataaatagtgttgggaaaatgaaatttccacctgcagaacaataaaattggacccttatctcacaccatatatagaactaaaaatcaaattaaaatgaattaaagattcaaacgtaataccagaaactctaaacttactggaagaaaacacagggaggaaaaactacatgacactctctgggcaacggttttttggatgtgaccccaaaagcacaggcaacaaaagcaaaaatagacaaatcagattacatcaaactaaaaagcttctgcatagccaatgaaacaaccaacagcatgcagaaacaactcacagattgggagaaaacagctgcaagccatacatctgacaagggattaatatccaaaatacagaaggagctccaacaactcaatattaagaaaacaagaaacccaattagaaaatgagcaagggacctgaatacacatttccactaaagtttttaagacataaacatactttggcataaacactgtattatatgcaattactttttgtaaataatttttgtaaagccatcagatatatatccaaatgatttttcacctgagtgtaagacaggaaaatgtttaaattaatacataaatcaaatcatctgcactggcattgttaacctagaagaaagtggctgcatagagaatagtaaaagcaaggatatttagtccatactttcaaatggggcttgatgatttgaaacaacaaagttgttcactggcagaatttcccaccaagtctgtataaattatgtgctatttgataaaagatagcctgaatgaagctaatttttttatcttcagtatttgctttaagagaaaaatcctgaagcttgtagggatttctaatgccaaaaaagatgatgaaatgggagagtatatttagcaatcatggtgactaagctcatggtaactggcatatgtaaaattttagtttgcattccaattacttaaactgagatgttcttgatcagttgaacatactgtgagtagacgatctctttctcagagaaacaagatggagagatcttcagagaatggccccactgaagctcattggtaaatgagctttctccagattttgttgatttcctgagtttttccataattcctcagttccctggccattttctgatagaccatggtcttcctattgccctttcttattcctcaaagtttggcaaatttttcttcattttttgatacaaactggaaactgcctttggttttatctacttactgaatgcagatgccatcttgggattatactgagatttgtgaagttattcaaacagtcagagaagcttcccgccttgtcctccctgttgctggaaaacagcagactgcaccagctggctttcagttatgttccacaaagatcaatgaatggttccttcaaaatagaagtctgcagcattatttattaaagttctccaattataaatagattcctctgtaagcaacattccatagcagttggaatctcctctgacatgggtacaatcactgatgaaaaccaggtaagttttgaagatctccagttgaatgttgcctcagtacctcaaaagcatcttcaaatgcttgagccagcttgtctcgttcacacaagttatgcttcactaataaactgatgattctgtccatcagtgcccaatctagcatgtacttgtagatgtggagataatcttccctcctctgaaacacacatctgcactccccaccacccactttaattttgttaaagcagttttgagttgggtttctgtcatctgcaaaggaaaaagtcctgagtcatttatacctaagaatcagataatttaagtaacaggctctaacatatgaaaatagctgagatagtgtggggtgcaaaacagagaggagataattattcccatccctaaataatatttgaaaagttttgttatacagtagaaatgcaactggctatccaatgatttgttaaatctttggactcagccccaagaaaaatagcaagatattgaacattacttgtggcctcaaataatattatatgagaaaagcagaagttcagtccaagctatactatctaaaagcagagagggaataatgaaacttcattttttagaaaaatctttatacccataccttgcaatccttgaggactgggagtcagaatttgaaaaggccaaattctgcatcctaagctaaaatttgtgaagacaaaagcaaagagataaagaaataccatactaaaatattgggaaagaaattgaaagggacacaacaaaatgaaaagatattccagattcacgaactgaaatacttaatattggttaaattataatactactcaaagcaatttacagattaaatgcaatccaattacattctctacagaaatagaaaaaaatcttaagacatatatggaaccacaaaagaccccaaataaccaaagcaatctgagcaaaaggaacaaagctggaggcattacactacctgacttcaaattttactacaaagctatagtaaccaaatcagtatgacactggcataaaaacagacagaatagaccaatgggacagaatagagaacgcagatgtaaatccacacatttacggccagctcatcttcaacaaaggtaccaagaacatataatggggggaaggataggcttttcaataaatggtgccaagaaaactagataactatatgcagaagaatgaaactggatccttctctcttaccatatacaaaaagcaaatcaaaattgattaaagattaaatctaaatcctcaaaccatgaaactactagaagaaaacattgaggaatcactccaggacattggtctgggtgaagatttttttatgtcagatctcaaaagcataggcaaacaaagtaaaaatagacaaatgggattatttcaagctaaaaacttctgcatagcaaaggaaataatcaataaagtgaagagaaaacccacagaatggcagaaaatataactaaccacctgagacggggttaataaccagaaggtatggggagctcaaacaactcaatagcaaaaacaaacaaacaaacaaaaacaacataatccaatttaaaaatgggcaatagatctgagtagacatttctcaaaagaagccatacaaatggccaacaggcatataaaaaatattcaacatcacaaattattagagaaatgcaaatcaatgagatatcatctcgccccagttaaaatggcttttatcaagaagacaggcaataacgcaggctagcgaggatgtggaagaaagggaacccttgtacactgttggtgggaatggaaattagtacagctactacacagaatagcttggaggttcctcaaaaaactaaaaattgtgctaccatatgatccaggaatcccactcctgggtatatctccaaaagaaaggaaatgaatatatcaaagagctatctgcacgcccatgtttattgcagcactattcacaatagccaaaatatggaatcgatctaagtgcccatcaacgaatgaatggctaaagaaaacgtggtatatatacacaatggaatattattcatctgtaaaaaggaataaaatcctgtcatttgcagcaacataaataaaactagaagtcattatgttaagtgacacaaagagacaaatactacgtgttctcactcatatgtggaagctaagaaaaagtggatctcatgaaggtagagagtagattggtggttaccagaagccagcaagggtagcagaagtaggggattcaaagaagttgataaatcaatacaaatataaagttgagagaagaaataagctccagtgttcaacagatgagtagggtgactatagtttacaaaaacatactgtacatttcaaattagaagagaaaaattcaaacatttctaggataaagacaaatattaaggtgatggatatcccaagtacactgatgtgatgtatacaaattatatgaatgtattaagttatcatgtgtgccctgaaactatgtaacttattatccatcaattttttaaattgttgaaaaaatgattaaatgaataaataaaatattgggtcttggatgagccagaaaatttgggaagtctgattctctctcaaatattatattctaggtattctttgccagacaaaagcatcatatcccttataaaaatgcatccagtaggttataatcttgggggaaatgccacattatttagcttcattttccccttcaagtctttcacattgttcaaagcagacagcaaagtgaaagcattattttgggagatggggaaaagccagaatagattattggcaagaaatagaaaccacaagatgaggatcaagagtcaaggtccaggtttagacaagatctctggatgtggttattatgccacagaatcatcaaatgtcaactgaggttttaaatactgcttaaaaatgccaagcctggaaataggtgcctgtaattcttcagtccttcagtaaatacccaggctattaaagtaggtaattcccaggaatgaaatcctccttgcacctctcttaggggtggccatggaggacacaaaacacagatatttatctttggaagaaggaggtagaactgtttttgaaaatatatataaagtatagttgtgtttggagaagcagaggcatttttgaaactatatgtataattagaatggtatgtgaatatatatacaaccaaagacaaaggggtaaaatggggtaaaaatctactattattcactatacggcactcattctcaactaccttctcagatctaaactctacttttctgtagagaaccccttccctgtggttaggacagggccaacactgacttgccaccatgacgacatcagtgggtacatgacctagactcagcaaattatgctacccataacatcggctaccatgatcatttaagatctggacatgaaatctaaactaggttctccctggacattttctgaaaggtattagagagtgggtgtagtggctcacacctgtaattccaacattttgggaggctgaggtgggaggattgcttgagcccaggagttcaagaccagactgggcaacatagggagaccttgtctctatgaaaaacaaaaaaattagctggaggccgaggcggacggatcatgaggtcaggagatcgagaccatcctggctaatatggtgaaacccgtctctactaaaaatacaaaaaagttagctgggcatggtggtgggcgcctgtaatcctagctactcggtaggctgaggcaggagaatggtgtgaacccgggaggcggagcttacagtgagctgagatctcgccactgcactccagcctgggtgacagagcgagactccatcttaaaaaaaaaaaaaaaaaaaaaaaaattagccaggcatggtgatgcacacctgcagtcccagctactcaggaggctgaggtgggtggatcacttgagcctgggtggtcaaggctgtggtgagctgtgattgcaccactatactccagcctgggcaacagagcaagaccctgtctctaaataaataaataaataaatataaaagtaattttttattatacattaagttctgggatatatgtggagaacgtgcaggtttgttaacataggtatacacgtcccatggtggtttgctgcacccatcaacccgtcatctacgttagatatttctcctaatgttattcctttaaaatggaaggtattaggaagatttctttccactgtcggtcaggaatgagatggatgtggtgctactgaaggtcgccttgccactctgtagtaaaagaaacctctgcaacgaatttgaggaaatcacagctgacagatgtaaagaggacacagagccctcctcacattgttagaattcctggaactaaacaaatcactccttttaccttccagctgtgtaagcctcctcctcaaaaaaaagaaaatcattttttgtgtaagctagtgttttctgcaatttaaagctttaaaaatccaactcaacaacaaaacacaacccaatttaaaaagggacaaaagacttgaatagacatttctctgaagatatataaatggccaaaaagcacacaaaaagatattcaatgtcattagtcattagagaaaggcaagtcaaaagcacaatgagatataccattttacacccactaggatagccatttcttaaaaatagagaataaatgttggtaaagctgtggagaaattggaaccttcatacattgctggtggggatgaaaaatggtacaaccactgtggaaaacagtttggtgattcttcaataaacacagaattatcacatgacctagcaattccactcctaaatatgtacccaagagaagtaaaagcaggtgttcaaataaaaacgtttccatttgtttacaaaatgttatacaccagtgaacacagcagctctattcacaatagccaaaaggttaaaacaatctaactgtccaccaacagatgaataaaaaaaatgtgttttgataccataaagttaaatgttcttcatccataaaaaggaatgaacgaaaaatacaacatggatgaccctcaaaaacactatgctaagctggccgggtgcagtggctcatgcctgtaatcccagcactttgggaggatgaggtgggcagatcatgaggtcaggagttcgagaccagcctgaccaacatggtggaacctcatctctactaaaaatacaaaaattacctgggcatggtggcgcacgcctgtagtcccagctacttgggaggctgaggcaggagaatcacttgaacccaggaggcggaggttgcagtgagctgagatcgtgccactgcactccagcctgggagacagagtgaggatctgtctcaaaaacaaacaaacaaacaaacaaacaaaattatgctaaataaaggaagccagacaccgaagaccacatattgaatgattccatttataagaaatgtccagaataggcaaatccatagagacagaaagcagattagtggttgccaagtgctgagaagagagagaaatggagagtgactgcttagttagcatttctgtttagggtgattttttaaagttctggaccgagatagaggtgatggctgcataacatgggtgaacaggcttaatgccactgaattgtacactttaaaattgttaaaacttcaccgtgattttaaaaatgttaaggtccctgactaatttaagcccactctgcaccgtgtagtcaggaactaggacttagagctggcatagagtgggaatttgtcaaataatcaccatcattttggattcttaatgagttgccaactgtcctaagtattactattttacatattgtaatgaatgctttgtgaaacaaaagcttttgtggttgttgctgttgattacaaattttatctctttttttaacttttattttaggttcagggtacacatgcaggtttgttgtacaggtaaattgagtatcatgggggtttggtgtacaaactgttttgtcacccagctgataagcatagtacccaataggtagtttttgatccttagcctcctcccactctccaccctcacaaaggcctcagtgtctactgttcccttctttgtgtccatgtgtactcaatgtttaggtcctacttctaagtgagaacatgcagtatttggtttcctgttcctgcattagttcacttaagataatggcccccagctccttccatgttgctgcaaagaacatgatcttgttcttttttatggatgcacagtattccacgatgtatatgtgccaccttttctttatctggtgtattgatgatgggcatttaggttgattccgtgtctttgctattgtgagtagtgctgcaatgaacatatgagtgcgtgtgtctttatggtagaacaatttattttcctttgggtattggtatggtttggctgtgtctccacccaaatctcatcttgaattgtagctctcataatccccatgtatcatgggaggaacccagtgaaaggtaattgaatcatgggggcgggttcttcccaagctgttctcatgatagtgaataagtctcacaagatatgatggttttataaagggcagttcccctatacacactctcttgcttgctgccatgtaagatgtgcctttgctcctctccaccttccgccatgattgtgaggcctccctggccatgtggaactgtgagtccattaaacctctttttctttataaattacccagtcttgcatatgtccttatagcagtgtggtctactgcaggtatatacccaataaggagattactgggtcaaatggtagttctgtttgaagctctttgagaaggctccacaatgctttgcacaatgactgaactaatttacatttccaccaacagtgaataagcattcccttttctctgcaatctcaccagcatgtttgttgttgttgttgttgttgttgttgttgtttgagacggagtctcgctgtgtcgcccaggctggagtgcagtggcgcgatctcggctcactgcaaactctgactctcaggttcatgccattctcctgcctcagcctcccgagtagctgggactacaggcgcccgccaccacgcccagctaattttttttgtatttttagtagagatggggtttcaccgtgttagccaggatggtctcgatctcctgacctcatgatccacccgtctcggcctcccaaagtgctgggattacaggcatgagccaccacgcccggccagcatctgttatttttcagctttttaataatacctattctgactggtgtgagaggatgggacatttagaggaaaaatcagcctttcttgtttcttccctcacagtcagtattaataaagactaatccctttagactatcacaagaagatactgcagaggaaagatgaagcttcttttaactaaggggtcacggccgttataatttgagcatcaaaagactggatgaaaacagatgtggccagagttctagttcttgttttggaggactagacggtatcagattaacccctctgccaaaattatttataaactctgggcaaaatataacaaacaggtctttgaagggactggagataaaccttagcaggcagaaactgagcagggaacagacagtcctcaaaatgaaggaagcacgtgagatgagctccacatttaccaagatttttctcctgagggacttcccagcttgctgctgctgcacacagcggaagagatctcaaacagaaagaagcaattttaggggatgtggagctagagattcgatttggggctcccagagaagctggaaattgaggaggaaatccccagaaaagggggacctatggaaggaaaataattgatagaacaagtagatgaaaaatcagtaagaacatagatttgaacacaattaacagacttgatcaagtggacattcacacaacacagcacccaacactgcataccacacactcttttcgagaactcacaggacctttacaaagtgaatcacgctggacgataaagtaagtctcaacaaaattaggagattgcaatcaggcaagacatgctatggctagtatgagcaaacaagccagacatcaatagaaatgacctgttttgaagatggcatggtattaacacagggattgacaagtagaacaattggaatagaagaatggacagcccagaaacaggcatatatggacacttcatttttgacagaggtggtgttaccagctgagggtagttgtccaggttcttggcgttttgaacaaagaactggacaaaatggacaaagcaaggcagcaagagcagagatttgttttaaatgaaagtacactccacagggtgggggtggctcatgcaagcagctcaagattcttggttacagaattttctggggtttcaattccctctaggagtttcccattgtcccccgaccagtctgattggttgcaggaggggaccaatcagaggtactttcatttttcaaccgccaggcagaaaaaggaggggcagcaactgtcgcgcagaaaaagggggtgttgaagagtagcctctgatatccagtgagcatgaaccggccttaggtttcctgcctccagaccctattctcctgcctcatttccccccctgagagacaggatccccgtaagtctttatgtgagacagagggactgatggtcttttttctgtaactgcgtcacactgacttgactgacagtccctgcctattggaatcacagaactctcaccctgctctgtctagtggagacagggtagtttcttgatggccaggggtggtgaattcatttggaactggctggaaaccttactgcacaatcatctccaggcaagaggaaatgaatggttaaaagatttcatgggaacttcaggaggtggacacctatgctgtcaggaatgtttgttatagaaatgaattaaaagattctacttaattactatgaaggaagtgattccaactgtttgaaagaaggtaattaatctgcaaaaaaaaaaaaaaaaaaaaaaacatggctactattatccagcctacagtaactatgcaacaaaaacaccaaggaacgttggtaggcatttctcttttggctgtcttctaaacaggtacttcagggctgccacaggttcacaggtgcagtggctgatgggaacttcaggttccaggtccggggcttcaggtatcacagacttgatccttgaaaggtgtatccaactatctaatcccagtactttgaccgcagaaggcgtggccagtatcactgaaaacggtgccttccattggggttgtaattgttgaggaggtgacccctccgtccatgctttaacaagcaccttatctgctggcctgatttgaggtggctggttagcttccagtaccggaagcctttgagttccaaacttctgtataaacctgctgacattgtcctaggttaactaggtattttactaaaccagctgtttctgaatcagtaattacatcatcagttaagaatagccttctgtaatcccagcactttgggaggccaaggcgggcagatcacctgaggttaggagttcaagaccagcctgaccaacgtggagaaaccccatctctactaaaaatacaaaattagccgggcatggtggttcatgcctgtaattccagctactcgggaggccgaggcaggagaatcgcttgaacccggaaggcagaggttgcagtgagccaagatcaaggcattgtactccagcctgggcaacaagagcgaaaattccatgtccaaaaaaacaaggccgggcacagtggctcaggcctgtaatcccagcactttgggaggccgaggcgggcagatcacaaggtcaggagatcgagaccatcctggctaacacggtgaaaccccgtctctactaaaaatacaaaatattagctgggcgtgctggcgggcgcctgtagtcccagctactcgggaggctgaggcaggagaatggcgtgaacccgggaggcggagcttgcagtgagccaagatcgtgccactgcactccagcctaggcgatagagagagactccgtctcaaaaaaaaaaaaaaaaacacacacacacacacataaaaacaaactaatagccttcgtataggcttatattaaattttgctctaggggtattacagatttttaagagagctatgggcagtaagctgacccaagcttctgatgtttcctgatcgaacttagctaacgatccttttagaggttgattagccctttctactttcccagaggattgaggcctccatgctgaatgtaaatagtatttgattctgagagccttagcaactacttgagttatctgggagataaagtatgggccgttatcactttggagacgctgaagtaacccaaactgggggattatttcttttaagagaaccttataaccacagtagccttctctgatctggtaggataagcttcgacccaaccagtaaagatatctattagcactaacaaaaacttataacctctgccagctggcatatgtgtgaagtctaatcgcccatcttttcctgggtatgttctatcagcgtcctctaatacaactcccctctggactggttctattacaggaggcattctgtttcctgggctgttcagtgcacacagtgagcaggtttgacagacatgcttaaccacagaagctaagttaggctcaatgaagagcctgttaaccacggccagggtggcttctctccccatatgcaaagagtcatgcagagtttttctaattctccatcaggctgcttgagggagatgtggttttgatgccatgtaccaccagcatcctgggttttgtcccccttgctcctttattaactgttcttcctgtggtgtgtattcaggctccattggggaatcacagaaaagaagtagagctggaatctgttgggattgcaccctgagaactacagctttcgcttctctatcagcctttctgtttccttgtgctataagggttaaggccctttgatgctccctgcaatgaattacagctacagcctttggcaggtgtattgcttccaaaagctgcagaatttcaggcctatgctttacaggggagtgtttgctagttagcagccctcttcctttccagattgtagcatgagcatggcaagggttacctggtccggtggaacctcccttacttcatcatcacttactgccttagttattccctttctcattcctccaaggagagcctcaagaaatttagcccagtttttcgttcccacgagagcattagagtctcaattaggatcagttgtggggactgtgtctgggcccaggtgattgccctgagggttttgggcaaataaatcgtctgcttcccagtgggcagcctcaaaagattcattccttttcaaagggggtgcaagaggttgctagaatgaattgaacatttctctgtgagagatcgaaggctgaggtcaaagtttggaacccatctgctaatttcctgggattcttagaagagcttcctagctttccctgacaccgttgtatatcagttatagagaaggtggcctgcactaggactggcccctcggctcctgctacttcctgaaggggtagcagggctggagggagagtggaatgtagtgtcccctccgagcgtgagggggacctagtagggtgtccagggtttgggttttagcctcaggagcacttggcaaggggctacgtgggggcggttatgttcaccctgagagacaggtggcccttataaaagggggtcatctatactatctagtcctgtctttggactttctttgcggagatgattaggttttggcgtagggccgtgaaggcctgtacatatggtatttctgaccatttgccctgccaggaaacagctgctgcaagactgaaaagaaaaggactcaggtccctcacccaaaccgggtggtggtgatcaggcgcttccacacggaaccctttcagtttccctggagagtggccccaaccacaaacctgcggttgcctccatgcctaggcactgtccaccgagagtcccgagttggaaaggaaaagagagagaaagaggacaaaaaggaaaataaatcccaaacgttgggcttacctcctggctggctcaccaaaatacgttaccagctgaagggtagttggccaggttcttggcgttttgaactgagaattggacaaaacacacaaagcaaggcagggaaagcagagatttactccaacagaggacagtgggctcaagcaagcagctccaaagcctgttactgaattttctgaggtttaaataccctctagagggttcccattggcccccgaccagtctgattggttgcaggaggggaccaatcagaggtactttcatttttcaactgcctcgcagaaaaaaggaggggttgaaaagggatgaatcgggcttgggttccgaacctaagcccaattcaacccctcctttccctcataagcagcatgaatcagccttagcttccctgcctccagaccctattctcctgcctcagtggtagtgtagatcaggcgaggaagtagaaattctaatagacagtggtgggacagggaagtgtccatatggaaaaaaatggacctttatatcatacgtaaataaatttcaagtagattaaaggtctaaacataaaaggcaaaattaagcaatgcatatagaagtgtaaaactataaacatttgcaaggaagtgattgtcacacgtttggagagtggttacttccgggaagaggaagaggtttgttgcaggtaggggatggagtggggaaagggactctgtccatattctaactcttggactgggttgtagctatctgggtactttttaatttgctttaaattattttttaaattgtatataaatatggtggccttttgtgtattctatacagtccacactaaaaatggttaagaaaaaaagcatgacgtatttaaagataaccaccaccgtaagtcaaatcactgagtaacttaaagctcacaagtaatatttaagagtacccagaaacttgttctcctcctagaaaatatatacagtcaaaaaaaacaagagccctcaaaagtgttagtccaaactgcaccattatgtaagtctcccgccatttcacagaccttggtcaaagtggaacattccacgggggttcggaccgtgagaaacagcctgcctcttatcttattctgctaggagaaaatgcaaggaacaccacactccaccagaacaagggccaaaccgcctgatcaaaggaacatcttatcaatatcctatcaggcagcaagccatactgcccaggcccctcccgcccatacctataaataccccagcctgtaagcagtgggcactgacactaagctggtcccccacctctataagtttatcctggacataaatgcctgcatttgctgttgagccattttctctctctctctctctctctctctctctctctcactctctctctctttttttttttttttttttttttttgagatgtagtttccctcttattgcccaggctggagtgcagtggcacaatctcagctcaccacaacctccgtttccccggttcaagcgattctcctgcctcagcctcctgagtagctgggattacaggcaggcgccacaatgcccggctaattttgtatttttagtagaaatggagtctctccatgttgatcaggctggtctcgaactccccacctcaggtgatccgcccgccttggcctcccaaagtgctgggattacaggcgtgagccactgtgcccagccaagttgttattatctaaggacctgaaatcaatagaaaggaattgtctgggttaagataaggggttgtggagaccaagattctgaggtgggaggcaggacttgactccagaggtggggctaggacactagaccagttgaaggctagctaaaaacaggtcggggtgcggggtggggtggggggcagaagcaccttctcataagacacacccaccagtgtgccaagtcagttgaccattgccatggcaacacctggaggttactgcccctttccatggcaacgacctgacaactgggaagctatcaccctcattctagaaatttctgcataactcctttaatttgcatataattagaagtgggtatgagtgcagacctgcctctgagctgctactctgggcacactgcctatgcggtaaccctggtctgcaaggaggaggacctccgctgctgctggtacactggtgcttcaataccaacctggccaacatggtgaaacctcgtctctactaaaagtacaaaaattagccaggcatggtgtgtgcctgtaatcccagctaatcaggaggctgcggcaggagaatcacttgaacccgggaggcggaggttgcagtgagcccagatagtgccattgcactccagcctgggtgacaaagtgaggctctgtctcaaaaaaataaataaataaaaaagataacataactctttcaaccaatttccagtcagaaaatctttcaatccacctatgacctggaagctgctgccttgagttgtcccaccttttcaggctgaattgacgcacacctgacacgtattgattggtatctgtgtaacttctgtcaccctaaaacgtataaaatcaagctgtggcccgagcaccttgggcccatgttcacaggacctcctggggctgtgtcgtgggccttggtcactcatttcactcagaataaacctttttaactatgttacactttagccctttttgtcgacagcctcctgtcactttcccttgagaagacgctgttttcgagaatactcccagtacctgcctttcttgtgccaactaagaacactcctattcatcataacctgcattctcacggagggtcgcttgttactcaccaggcaaacaaaccctggctttccaggtaacagtcggccctctgtatccacagattccacctctgccattatagagggctaagtatatgtaaaacctgtcatttagagccatgtgatttaaagaaaaatatctcactcatggatttgatgggtactgatatgcacttggctataagctattggtgtatccacaagctcattggaacagaaacccaactattacaacagaccctgaaattttgtgagctctcaaaaatttctgctcaaaaaatagattctcactttctgcttaatttttccgtaaatctaaaatttctcttaaaatgaagtctattaattgaaaaaatatatactctggaaatgggcaatgttgtctttaagaaaaacttgtagtcggtgtgtttgttgttaagcagttacaaaatttaagttatagcatttctgatttcgattcttagaaacaaaactagatttgttttgctttagaaagaatgtaaggaaagctaatttgtgaagtaagtacttcctaaaatgaagatgaattcctgtttagataaaccaggagaggaagttaaactgagtgagtgtgggaagaaaaaaaaaaagattcctttgagagatgcgccttttgagcataattgaaagtgactgagatgtacaataacgagggaaccaggcaataattcattaatggagcagcagcattactctaaacaaatatttgcttttacataattaaccaaactaaaatgatctgaatggaaaagtagtttacagtaaccaaaacagcatggtactggtaccaaaacagagatatagatcaatggaacagaacagagccctcagaaataacgccgcatatctacaactatctgatctttgacaaacctgagaaaaacaagcaatggggaaaggattccctatttaataaatggtgctgggaaaactggctagccatatgtagaaagctgaaactggatcccttccttacacctcatacaaaaatcaattcaagatggattaaagacttaaacgttagacttaaaaccataaaaaccctagaagaaaacctaggcaataccattcaggacataggcatgggcaaggacttcatgtctaaaacaccaaaagcaatggcaacaaaagacaaaattgacaaatgggatctaattaaattaaagagcttctgtacagcaaaagaaactaccatcagagtgatgaacaggcaacctacaaaatgggagaaaattttcgcaacctactcatctgacaaagggctaatatccagaatctacaatgaactcaaacaaatttacaaaaaaaaaacaaacaaccccatcaaaaagtgggcaaaggacatgaacagacacttctcaaaagaagacatttatgcagccaaaaaacacatgaaaaaatgctcatcatcactggccatcagagaaatgcaaatcaaaaccacaatgagataccatctcacaccagttagaatggcaatcattaaaaagtcaggaaacaacaggtgctggagagaatgtggagaaataggaacacttttacactgttggtgggactgtaaactagttcaaccattgtggaagtcagtgtggcgattcctcagagatctagaactagaaataccattcgacccagccatcccattactgggtatatacccaaaggactgtaaatcatgctgctataaagacacatgcacacgtacgtttattgcggcactattcacaatagcaaagacttggaaccaacccaaatgtccaacaatgatagactggattaagaaaatgtggcacatatacaccatggaatactatgcagccataaaaaatgatgagttcatgtcctttgtagggacatggatgaaattggaaatcatcattctcagtaaactatcacaagaacaaaaaaccaaacaccacatattctcgctcataggtgggaactgaacaatgagatcacatggacacaggaaggggaacatcacactctggggactgttgtggggtggggggaggggggagggatagcactgggagatatacctaatgctagatgacgagttagtgggtgcagcgcaccagcatggcacatgtatacatatgtaactaacctgcacaatgtgcacaggtaccctaaaacttaaaggataataataaaagaaaaaaaaaaagaaaagtagtttggagtattaactatgtacatgattactctcaagcagattacaggcataaatggcggttgtatttcacataactgcacatcaatagctttcaaaagaatctcaaccctccactgaccacagttcagacagattttccatttagatgcctgtttgatgcctcaaggccttagacattgccagaaatgacaaatgacagttgtcctggatatttctaggaacaccagctattatgctcagaatgttataataactcttctatttattacctacagctaaaaatctaatgatggttattttatagtgtctctggaaattggaaaggtaatcatgacctcgaacttctacaaacagagtggggggagacttaaaagaaaagggcttgaattatataattaataaatatcaatttttaagcataaaagccattgggttttttattattttggtagtgttaggtacatagctataagaaggtatcccaagcccgttttctcctcccagtcctgtgtcctaaagttttcctgatgtgtcaatagagtgtcactatagccctgtgaattagtagatatcgctctaatgagatatttacgcaggatgaagttgggagaaagtaaaggaatgcctaagccagagatctctgccaagattcacaccagcacctttcaaaactttgcagcctatgaagagccaaatattgcataatccagatcatgttttccaatattgtcaatggaaaatcctaaagtaagagattctcagaatcagagatactacttcaacccagattcttgtctcagtgcaggtcgtaaagacaaacaggcttgactctgacttggtactttcttctaagttcctaagctataacataaatatgcaatactagaaggtcataattattcacaataaaatgtcaatgcatttatttattaatatgcttcatttcagacagaattaacaatcttattcttctaacatatagcacttagtgagcccaatgaataaactcttgagagaaccttaatcagactctgactaaatacatgttttggcagatgtcttagtccattttctgctgctataatggactgtcaccaacttggtaatttataaagaatagcagtggctgctgggtgcagtggctcatgcctgtaatcccagcactttgggaggccgaggtgggtggatcacgaggtcaggagatcaagactatcctgtctaacatggtgaaaccccatctctactaaaagtacaaaaaattagccgggcatggtggcgggtgcctgtagtcccagctaccgggaggctgaggcaggagaatggcgtgaacccaggaggtggagcttgcagtgagcccagatcatgccactgtgctccatcctgggcaacagtgcaagactccatctcaaaatatataaataaatttaatttaatttaaaaagaatagcaatttatttgactcacagttctggaggctagaaagcctaagaacatggtgtcagaatctggcaaggaccttcttgctgcatcaacccatggcagaagggcaagcaagcacacaaaacagagacagaaaatggagacctaactcccacgacagctaagccactcccatgataacgtcaatctattcacaagggccaagccctcatgacctaattaccctttaaaggtcccatctcttaatactatcatgatggcaattaaatttcaataagggttttggaggagacattcaaaccatagcagcaggtatgagcaggtttaagtcagaagtccattgctagctatgacttactgacgggagccattgaaacagttaaacacctaggaaactaccttcttttgactcttcaagacattttgtaccagattatattggattatacgtagggtggaagcaggttttcgcatgccctcacttacagtacatatttcctatgttaggctcttctgtgaaaacttcttgttaatttttcaaatctgatacttactgagtacctctacatttttgcacttctcatttccagtaatccattttatctctgattatttctgtttgtcttggttactgcagttttattgtaaccttgcagtctatttgatcttttcactaatatttcctagtcttttttactcattttctatgaattctaactcatgcttcagctactttggtacccctttaaattcttcagtttctaatgagctttccaaaattcctaaggatagctaagtaattaaacgttgaaaaaagtgcctttaattgttataaacaatcactgttatgtcacctattaaatgtaaacatttccataagtaccagtgtagttttttcttgatcactggagacttgcccatttgtgagctagagtgatcacgtgaaaacctcaacaactaaaccatttcccattttacgattttgttttttgtgaaatttttttaaattattagattataaactatatcagacataccaaaaagtataagcattttatatgaagaaatttcataagagtagtctcttgttactctttttatcatcttacactgaatgaccttcttattttttctatttaaaaggtttgggagccaaatgcttttgtgggggtattaaataaaatgtatcggaggccattggttttgactgagctcctatactaagtccaacagaccaaaccaaaatggagtcactcatgctacaggcccacatcatcaagacaaaactaagttgtttatctgaccttccaagaaatcaggagagtgagacataatagccaaatccccaaacaacccaattttagctggtataataaggaagtccactctgctttaatctttacgaggaaagtaactctgaaacaaccagtctaccttttattttctatttctgctttcctcagccattttctgcctaccaccacctctgctcagcaactcagagcactcattctattttgtaggatgaggtgttaccttactctagaatggcaaataaaaaccaattaaggtctctaaatttgttgtaattttgtcttttgtcttttgatgggggttagccacttttgtatcctctgataatattttattgtatacaacttgtacacctgtacaccattctccttcatttgtttacaaatatggcaattttttcttcatgtcaaaagtatctacatccattgtaaaaaaaaatttaggtaatttggatgaacagaaaagaagaaaaataatataaaaaccatacaaaattctaccaccttgagatgtttcttttttgtatatttccttttgtgtaaccagggaggaggcctacactgcttatttctccttataaaggaatttccactcatataactcctgttgctaatgctgccttattttgtgccacgtggccccattccacaagtcacacaaatcacactgacgatgaaaaccctacctatattagtcaaggtttagtcaagaaaacagacaccaccctagacttttcaaaccaaataaagaggaacgttaataaggaaattggttacacaggaaatggaaaagctgagaagccaaacacaggatgagatgatgaggccactgagaggtcggcaacagccaaaagcaactgccaccctggaactaaagggtcaacgggatgaggtagtttcatcagagcacagaagttgaggccaaacagaaagagccagaactaaggagagggtatttcccccgcaggagctggaaccacagagagagcgtttggttgggaggaattggagacacacaagaaaagctgtcacggaaaacagagaaatagggggcaatatcctaggctttcccctcctcccaccctccagtcatctgctatcatctttctgtggccaaacttacccaaaagacttcaggcaaaggaaatgatgggaggtggggtgggatgggagcaaagcacaggcaactggccaacaattgtctaagagtagcccctgaagtgactggccacacatcacctatggcgtagtcttgctaaaaatgtttaagctgaatctaatcatgaggaaacaatcaggcaaatccatattgaaagacattgtactaaacaaccagcctagactctccaaaatgtcaatgtcctaaaagacaaaagaggacagagaacttatctaaattaaataacattagggaggctcacgcctgtaatcccaacactttgggaggcagaggcaggaggatcacttgagcccaggaattcaagaccagcccgggcaacatagtgagaccccatctctatatacaagaaaaatcaaaaaatgaggcgggaggatcacttgaacccaggaggtcaaggctgcaatgagccatgatcaagccactgcattcctatctgggcaagggagtgagatcctcctgtctttcaaaaaaacagaatattagggggacatggcaactaattttgatgtgtgatcacagattaagtattggatcaaaaaagaatggtatataaaggacacgacggggcaattgtggaaatatgaatatagttagtacactagatgatagttgtatagaaatgttaaatttcttgagtgtggtaatttggttgtggttatgtaagagaatgcccttgttctcagcagatatatgctaaagtatttaaaggtaaaatgtcatgatgtcttcaaccaactccatatatatatgcttggagaaagaatgtgtgatcaaacaaatgtggccaacgttaaaactggtgaatctaagtgaagcgtctataggcattcatggtactgttcttacaactatcccaaaggcatttttttttttttcagatggagtcttactctgttgcccaggctagagtacagtggcacgatctcggctcattgcaacttctacccgcagggttcaagcgattctcctgcctcagcctcccaagtagctgggattacaggcacctgacactgcacccggctaatttttgtatttttagtagagacggggtttcaccatgttggccaggctggtcttgaactcctgacctcgtgatccacccgccttggcctcccaaagtgttgggattacaggcatgagccactgggcccagaccctaaggcttttcaaaataaaaactcaggaaaaaaaaaaaaataggatggcctctgacctccgaccactgacacgaggtaaagagatgaattaaaccaactgttcttaggaatttaaacctaaacaaaaagaatttgctacttagcaataaagttggaggtgacagaaaaacatgtggagttcggctatagcaaattaaaattacgtacacaccaaaattatgaggtggaagaaaagatatggcaaattgtttgcaaaaatagttgccacagatgcttctcatctagtaagcaattctcccatcatgagatgaaatctatgtctccctgcgttctagactggtcttgtgacttactttgaccaacagaatgcagaggtgacacggtgccagttcttgaccacgaagaggcttgacatcttgcactttccttctcttggagccctgagccactgcataaagaagaccaactgcccaggaaacaacagatgctggagaggatgtggagaaacaggaacacttttacactgttggtgggagtgtaattagttcaatcattgtggaagacaatgtggcaattccttaaggatccagaaccagaaataccatttgactcagcaatcccattactgggtatataccccaaaggattataaatcattctactataaagacacatgcacacctatgtctattgcagcactagtcacaatagtaatgacttggaaccaacccaaatgtccatcaatgatagactggataaagaaaatgtggcacatatacaccatggaatagtatgcagccataaaaaaggatgatttcatgtcctttgcagggacatggatggagctagaaaccatcattctcagcaaagtaacacaggaacagaaaaccaaacaccgcatgttctcactcataacggggagctgaacaatgagaacacatggacacagggaggggaacatcacacactggggcctgttggggggtggggggctaggggagggatagcattaggagaaatacctaatgtaggtgaccggttgatgggtgcagcaaaccaccatggcacgtgtatacctatgtaacaaaactgcacgttctgcacatgtaccccagaacttaaagtataataaaaaaataataagaagaagaccgactgcctgctggagagattggtctggccagtcttttgctgttctagacacctctgctgagccacacaggtgagtgaaaccacccggaccctccagccccaggcaaggcggcccagccaacaccacatgaaacaaaaccaagctgttcctgtcaatcccttcccaaagttcagcattgtaaaccaacaaataagtagtggttggtttttttgtttgtttgtttctgttttcttttttggagtctcactctgtcgcccaggctggagtgcagtggcgcgatctcggctcactttgcaagctccgcctcccaggttcacgccattctcctgcctcagcctcccggtagctgggactacaggcgcctgccaccacgcccggctaattttttgtatttttagtagagacggggtctcaccgtgttagccaggatggtctcgatctcctgacctcgtgatccgcccgcctcagcgcctcccaaagtgctgagattacaggcgtgagccaccgcacccggccggttgttattttaagacaatacattttggggagattcgttatacagacaatccccaacccacgatggttcaacttggtgtttttcaactttaggatggtgcaaaagcaatacacattcagcagaaactgtacctcaaatacccatacaaccattctgtttttcactttcagcataatattcaataaattacatgagataggcaacactttattataaaatgggctgtgcgttagatcattttgccaacttgaggctaatgtaagtgttctgagcacatttaaggtaggctaggctaagctaccttagactaggttaggtgtattacatgcatttttgacttaacgatattttcaacttacaatgggtttatcaggatacagccccatcataaacagaggagtgtctgtagagctaatagagaacagagcagacagacacacagagatgcctgtaggaaatgctaagttttactattccggttccttccgtgcgtaggctcaaaacaactcctactctttttgagatacagcaaaaaaagagccagagaaaaaaaatgtctcttcctggctgctctgcctatggagtagccattcttttattccttcactttcttaataaatttgctttcactttaaaaaaaataaaatgtagggccgggcgcagtggctcacgcctgtaatctcagcactttgggaagccaaggcgggcggatcacgaggtcaagagatggagaccattctggccaacacggtgaaacccccagctctactaaaaacacaaaaattagccaggcgtggtgacaggcgcctgtaatcccagctacttgggaggctgaggcaggagaattgcttgaacctgggaggcagaggttgcagtgagccaagatcgcgccattgcactccagcctgggtgacagagcaagactccgtctcaaaaaaataaattaaataaataaattgtcccttcttatcctttctctttgcaggtatttttgttatccaaagattcagaataaatatctcttatttctaattgtttcattgacttccccttttattgagtaacagcacctgatttttttttgagacagagtctcgctctgatgcccaggctggagtgcagtggcgtgatcttgcctcactgcaagctctgcctcccgggttcaagcaattttcctgcctcagcctcctgggtagctggggactacaggtgcccaccaccaagcccggctaattttttgtatttttagtagagagggggtttcaccatgttagccaggatggtctcgatctcctgacctcgtgatccgccctccttggcctcccaaagtgccgggattataggcatgagccaccgcgcccggccagcacctgattttttaaatggtttgttgtaaaatgcatcatacaaatagaaggatggataaaatttgctcgacagaaatatttaaaagtaatggcaaacgccacaattacttttgcaccaacctaatataataataaggtaaataatcatctacccagtttaaggtataaaacataaccagtcctttagaagcctctgcttatccctcccaaattgtggtctcttctccatccgcagtgataaccacgatgatgacttatgttaatcattctcctgtttcctttacagttttccaccaatatatacatccctaaacaacatgacttagttttgaaacactgagcagcaagcaccaatctagaagaataaggaaagggtgatgttaccactgtttgaggaaggctcaggaggagaagataaactgaacagcctctcggtcattgtctggcttcagcttccctaagcatttataagagctttttatgggaaaatcattgagtaagatgatgagtaacactgggaatcactgggctcagcacaggtgagacatacggtaacgctggagaatgggccgagttttagatgtttggccaggatatagtcagaaggagatggctgttgtgtatattctgctcatcacgacttctcctccacttcccagaagaggtcaaggcagaacatttctggatgacacccacagtagatcaagcatcagagcactcgaggaatgagcaggaactttatcagcatgtggtcaaaataaagaaagtacaaaggaaaaatctgggccagactctgggtattgagtccttgatttaaaagttagcatgatggcagtggggatggtggtgatggaagccctcagtgtgtctctccctggagtcctggtgtcccacttcttcaggctggacttgtttccttctgcacctagtgcataactgtcattctggactctcccatcacccttaccctagagtcccttcaccactctcctgtgtttgattcctacctgttgtgtcccatatgttctttcttggcttgtcctctcattcaagaagcacagcctccagtagccccttaagaaagaacgcatgggaagtaaatcttgcatatctgaaaatgcccttattttacactcatatttgattgataatttagctgggtgcagaattctaggctgggaatagtttttcttaagaattttgaaaagcattgctctggtgtctcttgcctctaccattgtttattgaagccggcaaagccaaagctgattcccgatcctttatatttgatcttcgtatgtaccctctcccttgctctctaagcttttaagatctcttggactttgttctgaaactccatgataacgtgccttgacaggtcttttttcatccgtttctctgggcacttgaagaaccctttcaatctggaaactcatgtccttcttgagttttgagtaaacttttctgtatggttttattgatgactgcctctcctacatattctttttctctcttgagcaccaattattcaaatattgaacacaccggtttttttttgttttttttttttttttgagacagagtctccctctgtcgcccaggctagagtgcagtggcgcgatctcggctcactgccagctccgcctcccaggttcacaccattctcctgcctcagcctcccgagtagctgggaccacaggtgcccgccaccacgcccagctaattttttttgtatttttagtagagacagggtttcaccatgttagccaggatggtctcgatctcctaacctcgtgatccgcccgtctcggccttccaaagtgctgggattacaggcgtgagccaccgcacccggcctgaacacgccagtcttaatctctaatcttctgtatcttttctcttctattgttcatctccgtgtcttcttgggcgatttcctcaagtttatcgtccaactcttctgttacatttttcaggtctactctcttgctttaatttttaagggcccttttttcttctcttaaaattatcaggatcttattctgttcttataacatgggtgcaatctattctgtacctttccaagtatattaatagtagacttttaaagtttttgtatgcttgtttattctatggggttgttttgtttttctttacttttgttttgggcttcatagtcaatgtctgaagcagcatctgattcttctttgaagaactgctgcctcccatattctcaatccatgtgagtgaatgcatcatttgctaattctttcaacttaaataataaacttgctttagtttggatgtttgtctccttcaaatcccatattgaaatttgatccctaatgttgaaggtcgggcccagtgggaggtatgtgggtcatgggggtgggtccctcatcaataaattagtgccttcgctcaagggtaagttcttcctctgttcattaccgggagaactgattgttaaaaagagcctggcaccgcctccacaccttgcttcctctctcgccatgtgatctccacacacgctggctccccttcactttccaccattagtagaagcagcctgaggccctcacctgatgcagatgccagtgccatgcttcttgtaaagccaaagacccataagccaaattggcctcttttctttagaaattacccagcctcaggtattcctttatagcaatgctaaatggactaagacaataattaacctgcctgagcttcagtttcttcatccataaaatgaggatggacacagaatctgtttcactaggattgccaagagaatttagtgaaataatacagaggacacagattatgtgttcttttctggcttaggaaggttaaattgctcaaagttacacatcaaatcatgggactcagactcataatctgacacataatcaatattcaataaatttcagctatcattattatgacatagttcaaatgggactcacacctcctctcagttaaagagaggagtacatgagccagacctggccaatgagattcagccctaggatttttgctagaatgatttgaaaggaaattctcttgtcctgttaggttatcaagttggtaaagcacaatcccagagctgctggtagctctctttaacaatgcttttagagggtctatctgaaagtaaagccaaaccaagagacggaaacagattactgatgatgaggctggatgcagccttacctgaaggcactgtggccctggactttccagtattatgaatcaatatcttccttttctttctcttaagccatttttagttgagttttcattacttgcaacagaaagaatcccttgtaatacaaaaaaatactgttttgaaactgtgtatttcactgaatgtaacattatcatatgttcatgttattaaaattattcttcaacattattttgtgtctggtattttattttatgaagtcagtattagtggacagatacattgttattaatgtttcaatattataaataacactgaaatgaatatcctcatagctaaatttttgtgaatatcatgattgcttcctgaaaataaattcctagaggtggaacttctggattaaaagttgcatggaatattaagagttttgttatatatagtaaaattgaccccttgaaaggtggtaccaatttggtttcacaccagaaacatataagaatgcctattttctccatccattgcctatagttggtagtatttctcttaaaatctctgccaagttagtaacctctgcacaaaaatggtacctcattttacttcatatttatgtattgagttatctaccatgcacatatttttcattaatttgtgctagattcagttggttactgttttatttaggaatcctgcatctatattctgaaattggttcttctggtactcttatgtgctcagggttttttctagttttatacaataaattttaaacacagaagtttgaagatggaaaacctgggttcgagtctgaattccacaatacgatgtggaagcttgggcaattcaatcttccttaccctgaagaagaataacgcaatggcaagtgagccactaaacccccgcagaacctggaaaggctcggccctgggaggttcaatgtggaaaggtgagccatagagcaacaatcaagggggtgcctaacagtgtgtcatagaggatcaaccaccaaatcccctcctaccccacacacacaggtgaaaaaactgttgtgtatactcaccgtggtcgtggttacatgaatctatacaggtgttaaaatgtgtagaactgtataccaaaaagctaattttactgtatgataattttaaaataaaaaaatttgaaggccaggtgcggtggctcacgcctgtaatcccagcactttgggaagccaaggcaggtggatcacgaggtcaggagatcgagaccatcctggccaacacggtgaaatcccatctgtactaaaaatacaaaaaattagctgggcgtggtggtgggcacctgtagtcccagctacctgggaggctgaggcaggagaatggcgtgaacccgggaggcggagcttgcagtgagctgagattgtgccactgcactccagcgtgagactccagctcaaaaaaaaaaaaaaaaaaaaatttaagagacataaaaggataccaaaggaaggctagggaactgttagattttaatagagacaagagaccaaatacagtatgtggccctggatttgaacctggattcaaggcacctaatttgattgactgattgattgattgattgatggattgatacagagtcgctctgtcgcccaggatggagtgcaaatggcgcactctctgctcactgcaacctccgcctcccgggttcaagcgattctcctgcctcagcctcacgagtagctgggactacaagtgcacgccaacacgaccggctaatttttgtatttttagtacagatggggtttcactatgttgaccaggctggatgcaaactcctggccctcaagtgatccacctgcctgggcctcccaaagggctgggatcacaggtgtgagccaccacacctggcccaaagtaactaattttaaaaagacatttttaaacataagtgaaaatataaatgcataataactattaaataatatcatggtattatatattatgatatgataaatgatatggtagttatgtatgaaggctatgtatttttaaagtccttatcagttagagacatatactaaaatattcaaaggtgaaatgacatgatgtctgggatttgcttttaaatactccagaatatatatatatatagtaaatatatggtgtgtaacagaataagagtgggatttttgtctctttgtttactgctgtgtcttcaatttctagaagtttgggagtttgtggtagatacttagcaaatattagttgaatgaattagttgaatgaactcctcttattgcctgtctcacaaactgtgacggtacatacctctacggatgtctctatctcttagctcaactatcactcctgacttctcccatgtacagtactgcaactgcgcattgatgaatccatgtctaaaatcctgctcagatagaaagaaaagtcttcgctggtaaagttcaataagcagagtcatcacgagttttccattttcttttatagttttcactgtacatatgagcccatggtaatctggcccctgactaactttccaattacatactcccactgtctccttccatgaaacctacatccaagtcccacaaaaaacttaactgtccatcacaagcaccttgatatattaaatttctctgcctttgtacctggagttccctctgtttaggatgcgattttctcttcatacatctagtagtgagttctgttcattcttcaaaattcagtccaggagtgaaatcagtaacatggcagaataggatgttccagctctcatccccccatagaaacaccagttaaggcaggcagtgacagatgagaatcattatgtgggaggcctggagtctggctgaggttccagcaccccactggagcaaatcaacccaagagtggaagcatcgaaaagggtaagaagtgcagttccactttacctgcatcagccctcccccaaggaggcacagcttgtgctgagagaagctcctttggctttcaatctctccacaggggaaggtaaaagcatagtcaacacctggcttccccagacttgaataacattgcccaggaggctcacttctgtctccctgcccagaatacagatgatcagcatgaagaacactgaatacagaatacagatgatgagcatgaagaacactgaatacagaatacagatgatcagcaagaagaacattgcccgggaggctcacttctgtctccctgcccagaatacagatgatcagcatgactgatcatctaggaacagggagaagggaatggactgcacagcaaccagcatgtggtttcaacaaccaaccacagattctgccacttagctcacagactccagcaggagacttgcccacaaatcccaccagatgactcacgtgaggaccctccacccaacgagtctatgcaacctgcatgccccaccccaccatgtatggggcccaacacaccactgtgcatggcccacattaaatgctgcagagagaacatgaacattaacaacaggcatggatcttagcagctggctcaactctgctggacttatgggaaaacatcaagcaaactaatataaatattatagaaatcccaaaaggaccagagaaagagaaagggaaagaaagcttattgaaggacatgaacagacacttctcaaaagaagatatttatgcagccaaaaaacacatgaaaaaatgctcaccatcactggccatcagagaaatgcaaatcaaaaccacaatgagataccatctcacatcagttagaatggcaatcattaaaaagtcaggaaacaacaggtgctggagaggatgtggagaaataggaacacttttacactgttggtgggactgtaaactatttcaaccactgtggaagtcagtgtggcgattcctcagggatctagaactagaaataccatttgacccagccatcccattactgggtatatacccaaaggactataaatcatgctgctatgaagacacatgcacacgtatgtttatggcggcactattcacaatagcaaagacttggaaccaacccaaatgtccaacaatgatagactggattaagaaaatggcacatatacaccacggaatactatgcagccataaaaaatgatgagttcatgtcctttgtagggacatggatgaaattggaaatcatcattctcagtaaactatcgcaagaacaaaaaaccaaacaccgcatattctcactcataggtgggaattgaacaatgagaacacatggacacaggaaggggaacatcacactctggggactgttgtgggttggggggaggggggagggatagcattgggagatatacctaatgctagatgacgagttagtgggtgcagcgcaccagcatggcacatgtatacatatgtaactaacccgcacattgtgcacatgtaccctaaaacttaaagtataataataataaataaataaataaataaataaataaaatataatgacagaaaactttccaaatctgtaaagagaaaaaaaaaacactcagatccattaagcccaaagaattccatatacattgagaataaagaggtcttcaccaagacacattataatcaaatagtcaaaaatcaaagacaaagaaagaattttcttccttttgttttgttttaattattttttatctcctcaaattccttttaccagagaatttttaaagcagcaaaagaaaaacaactcaacacatacaaagaaacctccacaagattatcagtgggtttctcaccaaaaaccctgcagaccaagatagagtggaatgatatactcaaagtgctggaagaaaaaaaactgccaaccaaaaacatactcagcaaagccatctttcaaaaaggaaagaaagataaagaccttcccagacaaaccaaaactgaggaagttcatcacccctggacttgccttacaagaaatatgaaagggagaccttcaagttgaaatgaaaggaatatgtatcagcaacatgaaaacatacactcactgataaaggtaagtatatagtcaaactcacaattctctaataccatgatgatggtatatagttcgatacacaatataaaaagctgtaaattgtgatataaataatataaaatgtggggggaggagtaaaagtatatagtctttgtatgtaataaaaattaagttgttatcagcttaaaatagactattacaactacaagatgttttatgtaagcctcgtggtaatcacaaaaaaaatcctgtagtagatacacaaaagataaaaagaaaagaatcaaagcataccaccacaaacaataataataataaagccacaaaggaagacaacgagagaggaagaaaggaactacaattaacaaaatagcaatagtaagtccttacctatcaattattactttaaatgtatatagactaaattctctcattaagaggcatacagtggataaacggaattttttttttttttttttttgagatggagtctcgctgtctcacccaggctggagtgcagtggcctgatctcagctcactgcaacctccacctcccaggttcaagcaattctctgcctcagcctcccgagtagctgggattacaggcacccaccaccatgcccagctaatttttgtatttttagtagagatggggtttcaccatcttggccaggctggtgttgaactcctgacctggtgatccacctgccttggcctcccaaagtgctgggattacaggcctgagccactgcaccgggtcaataaatggacttttaaaaataagacccaactatatactgtctacaagagactcactttagatttaaggacacaaatagcctgaaagtgaatggatgaaaaacacatcccataaaaatgataaccaaagagagcaaaggtggctatacttacatgtgacaaaatagacttcaggtcaaaaactgtcataagagacaaagaaggtcattatatatactaacaaaagggtcaattcatcaggaagacataaaacagcaatacataatagaagaaatcaatacccccactcaacaatggttggatcatccagacagaaaataaataaggaaacagtggaattaaacactagataccaaacagatccaatgaacatatacgtgacattctatccaacagaagcaaaatacacattcttcttaagcccacatggaacattctccaggatagatcacatgttaagcaacaaaataagtcttaacaaatttacgaagattgaaatcatatgaaatatcttttccaatcacaatgaaatgaaactaggaataataggaggaaaattggaaaactcacaaatatgcagaaattaagcaacacactcctgaaaaaccaatgggtcaaagaagaaattaaaagaagagacaaaaatatcttgagacaaacaaacaaacaaacaaaaaccaaaatgggatgtatgggatgcagcaaaagcagttattggagggaagtttatagcaacaaatgattacgttaataaaagaaaagttctcacataaacaacctaaagttacaccccaaagaaatacaaaaataagaacaaagcccaaagttagcaaaaggaataataaaatttagaccagaaataaatgaaatagagactagaaaaataataaagagaaatcaatgaaacaaagagttgggtttttgaaaaacacaaaattgacaaacctttagctaaactaagaaagagatgagatataaataaaattatatatgaaggatgagtcattccaactgataccatgaaaatacaaaggatcagaagaggttactgtgagcaattatacaccaacaaattgggtagcataaaaaaatggataaattctcagaacttacaacctacaaaaactaagtcaggagaaatacaaaatctgaacagagcactaacaaagactagatggcttcactggtgaattctacaaacctttaaaaagaattaatgccaatctttctcagttttttccaaaaattaaagaggagggaacacttctaaactgtttctacaagaccagcattaccctgatcccaaagccagataagaacactacaagaaaagaaaaatacgagacaatatccctgataaacacaaatgcaagaatcctcaacaaaatactagcaaacaaaattcaacaatccattaaaagaataatacaccatgatcaagttagatttattcctgggatgcgaaaatggttcaaaatacacaaatcaataaatgtgatccatattacagtaacagaatgaaggataaaaatgatcatctcaatagatacagaaaagcatctgacaaaacttagcatcttttcatgataaaatctttttacaaattaagtactgaacaatgtaactcaacataagaaggccatacatgacaagcccacagctagcatcatactcaacagtgaaagtcaagttttcctctaagaccaggaacaagacaaggatatccattctcaccacttctattcaacatagtactagaaggcctagccagagcaattaggcaagaaaaagaatgaaatggcatccaaatagaaaaggaagaagttaaattgtctcatttgctaacatgatcttatatgtagaaaaccctaaagattccaccaaaaaaactgctaaaactaataaatgaattcagtaaagttgcaggatacaaaaaccaacctacagtatcagtagcatttctataccctgacaacgaactatccaaaaaagaaattaagataacaattccatctacaataacatcaggaagaataaaatacttaggaatacacttaaataaggaggtgaaagacctatacactgaaaactataaaacattaatgaaatatattggaaagtcacaaataaatggaaagatatctgcaggacagttatttagggaggaggtagacttgcactgacttagttcttcccctttcttgcttgtagttcccaagaataactataaaatgtgctgggaattcgccatcctgagataaggagttggccagaatagcccaggctctattccagtctcccctagaaataagatgtccttcagtgatttagcccagtatgtcacataccccagggtattaaaaaaaagccagccaggtgcagtggctcatacctgtaatcccagcactttgggaggccaggagtttgagaccagcctgggcaacagggcgaaaccccatctttactaaaaatacaaaaattaaccaggcctgatggcacactcatgtagtcccagctatacaggaggctgaggcaggagaatcccttgaacccaggaggcggaggttgcactgagccaagatcatgccactgcactccagtctgggcaacagagtgagactctgtctccaaaaaaaaaaaaaaaaaaaagccagggcaggctgctttttttgaggaggtccctcagctgcaatgcaggtggagcatgcacatatgacactccatccaccacaagcagttttccagagactccgggaatgcttgcaatgaacactgggtttctgttgtcccttgctgcctatctgtaggtaataaatccactatatttaatttgctgcgtataagtgtgttcagtcttactggactcagggaagttggtaatcagtgcacagtaaacctattccacaaaatcccatgtccatgaataggaaaaatcaatattatcaaaatgtctctactacccaaagtgatctaaagattcgctgcaacccctttcaaaattccaatggcatttttcactgaaatagaaaaaagaaatcctaaaacttgtattgagctacaaaagacttctaatatctaaagaaattgtgagcaaaaacaaaagagctgaacataaacattaaaaaaatgaaattagaccttatttataacatacacaaaagtcaactcaaaatggattaaagacttaaatgtaagacctgaaatcataaaaatgttagaagaaaacatacaggaaagctctatgacattggttttgacaataatttggggggtccatcaaaatccatatccatttttggatatggtaccaaaagcacaagcaacaacagcaaaaataaatagaattatatcaaactaaaaagtttctacacagcaaagaaaacaatcaacaaaatgaaaaggcaaccacagaatgggagaaaacatttgcataccatgtatctgataaggggttaatattccaaatgtataaggaactcatacaactcaacagcaaaaaaaaaaaaaaaaacctgatgtttaaagtgggcaaaatacctgaataaacatttttccaaaggagacatacaaatgcccaacaggtatataaaaaggtgttgaacatcagtcatcatcaaggaaatgcaaatcaaaatcacagtgagacataatctcatacctgttagcatgagtattatcaaaaattcaaaaataacaaatgtcggtcaggcgcggtggctcacgcctgtaatcccagcactttgggaagacgaggtgggcagattacctgaggtcaggagttcgagaccagcctggccaacatggtgaaaccccgtctctagtaaaaacacaaaaattagctgggcatggtggcgggtgcctgtagtcccagctactcaggaagccgaggcaggagaatcgcttgaacccaggaggcagaggttgcagtgagctgagatcatgccattgtactccagcctgggcaacagagtgagactctgtctcaaaaaaaaaaaaaaaaaaaaaaaaaaaaaaacaagggatgcagggaggggaaaatgaggaagtggtaattacagagtacgaagcttcaattatgcaagataaataagttctggaaatctattatatggcataccgcctgtagctaacgatgctgtattttgtacttaaaattgctaaaagagtagattttatggtaagtgttcttgccaaaaaaaaaaaagagccacacatcatcatcatcatcatcatcattatcacagaaggggacaggaggaaactttgggagatgacgatgggtttgatggtagtgttggtttcacaggcatatatttaactgcaaattcattgatatgtgataattaaataggaatagcttttcatatcaatcatacctgaataaaagtagtctaaagacttcagtattaacttctcattgaaaactcccctgactcttccaatctctgtgctcctaggcttcagtcaggattctttttttttttttttttttttttttttttgagatagagttttgctcttgttgcccaggctggagtgcaatggagcaatctcagctcaccacaacctccgcctcccaggttcaagtgattctcctgcctcagcctcccgagtagctgggattacaggcgcccactaccacgcccggctaattttgtatttttagtacagacggggtttctccatgttggtcaggctggtctcaaactcccgacctcaggtgatccacccgcctcggcctcccaaagtgctgggattacaggcatgagccaccgcacctggccatgccagtcaggattcttacacattttatttgtgttttcactgcaaggcttcttttcccagtagacagtgggtcataataatagtagttattatcatacactaaaccagtgcttactagttactattccgatcatttcacttgtattgacctttaattttcgcaaaaatcattcagggtaggtacttttcttcacaatttacaaatgaagcaactgaggcacaaagatgaaataactttcccaagatgacacatctagtaataacggagacagaattgcaaacacgggtggtctggatccatggtctgcgctctcaacaactactctacgcacaacagcttctccacacaaagtgctgcgtgcttggctgcaaccgctgcctaacgtcattttaaggtttgccaaatgtatttgtctaaagaatgcattttaagttgtaatacatcgatgaaaagtcaacaaggattcaagatatgtactatatggctgagttttaaaaggaaaaaaagaataaaaaactatagaaaggagggaaagaggaagagaaggaagaaggcaaaagaaggatagagggatagagagaggaagatagaaagaaaataaaactggtttcaaagtcacaagaaatgaccaaaattgaaaattgaaattctacagaatactgagagacgttgacacataaataaataataaagaagtacaccatgcccatggagcagaagactcagtatagttgagataccaattttcagccaggcgtggtggctcatgcctgtaatcccagcactttgggaggccgaggcgggcggatcacctgagatcaggagttcaagaccagcctagccaacatggtgaaaccctgtctctacaaaaatacaaaaattagccaggcatgttggcgggtgcctgtaatccacttcttgacaggctgaggcgggagagttgcttgaacccaggaggtggaggttgcagtgagctgagatcacaccattgcactctagcctgggcaacagagcgagactccatctcaaaaaaaaaaaaaaaaaaagacatcaattcttcctagactgatttaggcatcaataaaaatcagaacctcagacagctattttatagaaggagacaagcagaatttcaagtttaaatagaaaagcaaaatatctagaagatccaaaacaatctagaaaaataagaacaaagttggaagactgatactatctgactttcaagacttagctaactataaagctagctcagtaatagatattaatatatgaaacggtaatatatattattagcaagagtgttggcatcaggatagacatatagatcaatgggacagagtccagaaatagacctacatgtatataattaattgattttcaacaaaggtatcaagataatagaggataatcttcgcaaaaggtgctggaataatcagatatccataggcaaaacaatagagctcaactttatctcacgccatataaaaataattcaaaataaataataaacctcagtatatgaattgaagctataaaacttttttgtttttttctgagacagagtctcaccctctcgcccaggctggagtgcagtggtgtgatctcggctcactgcaacctctgcctcctgggttcaagtgattctcctgcctcagcctcccgagtagctaggattacaggcacccgccatcatgcccagctaatttttgtatttttagtagagacgggggtttcaccatgttggccaggctggtctcaaactcccaacctcgtgatctgcccacctcggcttcccaaagctataaaacttttagacaaaaaacataggagagtaatgttgtgactttggctgaagcaaagttttcttaaataagacacaaaaatacaagcaacaaaagaaaaaaagaacaaacttcatcaaaatttaaaacttgttgtcttcaaaagacacagttaaaacaatgaaaatttcaagtccaacaaatctttctttttaaaaagactacaaaaacacaaggcacagactgagagaaaaagatttgtaaaacacgtatctaatgaaagattgtattcagaatatataaagaacttctacaacttcataacaagaaggcgacccaataaaaagaggccaaatttgttaacagacacttcactgaataagctatatgaatagcaaatacgtacatgaaaagatgttcaacatcatcagtcaccagagaaacgcaaattaaaactagaatgactaaaacttaaaagactattaaaaccaaacattggtgaggttgtagagcaactggaacattgctggtaggaaagtaaaatggtacaactcctgtgaaaaacagtttgacaatttctcataaagttacacacacaattaccacatgactcagcaattccactcctaggtgtttacccaagagaagtgaaaacagtccacacaaagacccgacaacatatattcataacagcattaaattacgttcaaagcagcactgtttcctaaagccaaaagctggaaacaatccaaatgtttgtcaacaggttgatgaaacggatgatcaaattgtgacatttctatacaatgaaatattgctcagctataaaaaggaatgaatttaagattaaatggaggcacttcttcctatacttcccactaagtatagctaaaaccatggatattatagataaaacaaacactaaaaggctcttgaaggtggagagaagacagaacaattggaagccttgggaccttgggaatggcatggcagtgagttctctgggttttcttttcttcctcatatatctggaactggatgctggagaaaccactggaaagaccaatgggcgcaaacgaaaaaaataaaataaaatccccaagaaagcctggtctctctggccaaaagaccaggaaaggactaatttggcaagacagaaaacttttagacaaaaatcacactatccttgccaaacatcatggaaagaaccacaaccctgttgccatcccattagcaaatgctgagtggcagcctggatttctacccttacctggctgggacaaggcacacttaaaattcccctgctgggccaggcgtggtggcttacacctgtaatcccagcattttgggaggctgaagggggcagatcacttgaggtcaggagttcaagaccagcctggccaacatggtgaagccccatctctactaaaagtacaaaaaaattagccgaccatgatggtgcacgcttgtaatcccagctacacaggaggctgaggcagcagaatcgcttgaactagggaggcgaaggtttcagtgagctgagattacactattgcactccagtctgggtgacaggccgaaactttgtctcaaaaaaaaaaaaaaaaaaaaaaaaaaggtttcaatgagcaattataaacacacttgaaacaaatagaaaatgaaaaatatcagctgagaaataaaaaatttaaaaagaaccaaatggaaattttagaactgaaaaatagaataaccaagataaaaagctcaatatatgggcttactagcgaatgggggaaacagaggaaaaattaacgaaatgcaagacagaatagaaattgcccaatctgaacaacagaaagaaaatgggcagaaaaacaaaataaaataaaataaaaagaatctcagggacctgaggggctacaacagaggatccagcaatcacatcactttagtcacaaaaggaaaggagacagggggtggagctgaaaaaatattcaaaaaaatgatagatgaaatgtccccaaatttggcaaaagatctaaacctaccttagcaaaccccaaacagagtaaactcaaagaaatctatgccaaagacacatcataatcaaatttctgaaaactaaagacaaagaaaacatttctgaaaacaatgggagagacagacaacattataccttcaggaagaaataatttgagtgacagcagatttctcatcagcaatcacagaggccacaaggaagtagaacagccttttttaaatacagtcacacatcacttaaccacagggatacattctgagatgtacatcactctgagaaatgcatcactagccaatttcagtgttgtgcatacatcatggagtgcacttaaacctagacggtataacccactacacacctagactatatagtatagtccattgctcaaacaacctgcacaacacgttactatactgaatattgtaggcaactgcaacacaattgtaagtatttgtgtatctcaacacagaaaatgtacagtaaaagtatggtattaaagattcaggccgggcgcggtggctcacgcctgtaatcccagcactttgggaggccgaggcgggcggatcacgaggtcaggagatcgagaccatcctcgctaacacggtgaaaccccgtctctactaaaaatacaaaaaattagccgggcgaggtggcgggcgcctgtagtcccagctactcgggaggctgaggcaggagaatggcgtgaacccaggaggcggagcctgcagtgagccgggattgcgccactgcactccagcctgggcgacagcgagactccgtctcaaaaaaaaaaaaaaaaaggttcaaaatggcatacctgtacagggcactgaccatgaatggaacttgcagaactggaagttgctgcagatgggtcagtgagtgagtggtgagggaacgtgaagacccagggcattgctggacactcctgtagactttataaacattgtacatctcccctacactaaatttatctttaaaaacttcttttggccaggcacggtggctcacaccgtaatcccagcactttgggagcccaaggcgggcagatcatgaggtcaggagctcgagaccaacctgactaacatgctgaaaccccgtctctactaaaaatacaaaatgtagccaggcgtggtggtgcccgcctgtaatcccagctactcagaggctgaggcaggagaatcacttgaacccgggaggcggagattgcagtgagtcaagatcgcgcattgcgccactgcactccagcctgggtgacagagtgagactctgtctcaaaagaaaacaaaaaaacttctttcttcaataataaattaactttagcttactataatttttttactttataaactctttaattctttttaactttttgactcatttgtagtaatgcttagcttaaaacacaaacatattttacacttgtacgaattttttctttatatcctaatttcacaagcttttttctatttaaaattttttttacatttatttatttatttattcattcatttatttatttttcagacggaatctcactctgtcgcccaggctggagtacagtggcacaatctcggctcaccacaacctctgcctcccagggtcaagtgattctcctgcctcagcctcccaaatagctgggattacaggcgccctccaccacacccagctcatttttgtatttttagtagagacagagtttcaccatgttggccaggctggtcttgaactcctgacctcaggtgatgcacaagccttggcctccaaaagtactgggattacaggagtgaactactgcacccactgcacccagccctttttttttttcaatttttattttagatttggggatacatatgcaggtttctttctttttttttttttttgagacagagtctggctctgtcgccaggctggagtgcagttgcccgatctcagcctcagctcaatgcaacctctgcctcccgggttcaatcgattctgctgcctcagcctcccgagtacctgagattataggcgcctgtcaccacgcccggctaatttttgtatttttagtagagacggggtttcaccatgttggccaggctagtctcgaactcctgacctcaggtgatccacctgccttggccacccaaagtgttgggattataggcacgagccaccgcacccagcctacatgtgcagccacctgagtaggtgggattacaggtgtgcaccaccatgcccagctaatttttgtatttttagtagagatggggtttcaccatgttggtcaggctggtctcgaactcctgaccgtgtgatccacccgccttggcctcccaaaatgctgggattacaggcgtgagccaccatgcccagccaagaaattgttttaggtaatgaattactgatagccacaaaaaagtgaataaattacaaagacatgatgctgagtggataaagccagatacagaagagtatattatatataattctacttatatacaactttagaaaagacaaatctgtagtgacagaaagcagaccagctgtttcctggagccagggagactgactggtatgagcacaaaagaacatttaaggtgatgaaaatgttccctagtgatggatacatgggtgtgtacatttgctgaaacttggaaacgcacatttgaaatgaatacattgtattgtacatgagctctacctcaaatacacttgatttaaaatccctttacaaaacattagaaagataatcaaattatatcattttatgaaaaagaaaagaacaaaataatttaagatacagtaaaatatttaactgtatattttttgttacaaaatacggcatatttggccatttgggtttaagatgattgagaaggtccaatccaattgtaagacatatcctacacatatgcaaaagccttactaacattgatactttgtataaaacaaagtcatatattgtgcatcctcatattatcctcaaaatctgataggtggaaccttaacggcctattttcactgatcaatcacttcactggctgtgcagaagtgtatcccactataaaccagaaagcaaccacagttgtatagatataataagagggaaatgctgcttcaatagaggagtttcttgatatagtgtactcagattacaggagactgagatccagctactgcttgaaatattttacttagccgttatacaagagtacagggtcaccacaaataaccccaaagagaaccccaaacctaaacatttttaaacaaatttcaaaacgttggtgataaattctctgtactatctttgcaattttcctgtaaatctaaaaccattctaaaatttaaagtttattttttaaagctattgttttataaaataaatcacagaatattttttaatgttgataacaccatggcatgagcgggtggtgtgacatttctgaatcacacatcagtggaatcttgatgtcaccgattttacatgttactttttgaggttaggtggagactgcaagtcctcacagattaatgctgtaaagtagatttatgaaagggagactttaaaaaccccacccaagacgcactcccaaaaaaagtattgctgctgcttgcaaaaacacctccagataccagaaaccactgaaaagataataaatattactataaaattaacacaaactagagccaagcgtggtggctcacgcctgtaatcccagcactttgggaggtcgaggtgggtggatcacctcaggtcaggagttcgaggccagcctggccaacatggtgaaaccctgtctctgctaaaaatacaaaaattagccaggtgtggtggtgggcgcctgtaatcccggctactcaggaggctgaggcaggagaatcacttgaacctggaaggcggaggttgcagtgagccgagatcacgccattgtactccagcctgagcgacagagcgagactccatttcaaaaaaaaacattaacacaaactagctggccagtggtagggtgatctctacataatgatagagaaatttggaagattatccgtgtgaaaatacaagttgaataggagatgccaaatcaaggtggctgactttaaaggacctcctctgggagctggtggacagaactgtcgatatgatttgaatatccggcccctccaaatctcatgctgaaatgtgacccccagtgttggaggtgggcctactgggaggtgtttgggtcataggcgcagatccctagtgaatggcttggtgccatccttgaagtaatgagtggtaatgagttcatacaagatctggttgtttcaaagcttgtgataccttcttgctcactctctcttgcttgctctcttgccatatgacatgcctgctctccctttgccttccaacatgattggaagcttcctgaggccctcaccaaaagcagaagctggcactatgcttcttacacagcctgcagaactgtgagccaaataaacctcttttgtttataaattacccagcctcaggtattccctaatagcaacacaaagcagactaatgctaacacaactgtcttctatccctcctaagattaataggcaggaaccaagataataataataaaataataataataataataataataataataataataaattatccagaaaaaaaggggatgactacttccaactacatgaaaaattttaaaagaaatattaaatagtgagtcaacatgaaactataaggccatcactaggcagtcttctcatactcaaatgcattgacctttatcctggctgactcacccatagaaatatgaaaaaaaaacctaggagatgccaacttcccacccctgagggttgaaggtcccagcaatttcgagaaaatatccccacaaaaaggacccagtggctgggcgcggtggctcacgcctgtaatcccagcactttgggaggccgaggtgggcggatcacctgaggtcgggagttcaaaccagcctgaccaacatggagaaaccccatctctactaaaaatacaaaaaaaaaaaattagccaggcatggtggtgcatgcctgtaatcccagctactcgggaggctgaggcaggagaatcatttgaacctgggaggtggaagttgcagtgagctgagatgccaccattgcactctagcctgggcaacaagagcataactctgtctcaaaaaaaaaaaaaaaaaaaaaacccaggtatgaggatagcaagaaattcactccacatgcaaactcacttgcacaaatcctggactgccaggaagaacgccactcacaggctggtacattgtttgaagtcagtagttttttagccacagtctacagctgcccaggtgctccagcctagagaccgtacctctgcctcacctctggccttactcaggactcttttgtctacgtgtaacagaaagtgaattcaaagtggcttttaaaaataggcatttttaggctggtgcagtggcttacacctgtaatcccagctgtctgggaggccaaggtgggtggatcacctgaggtcaggtgttcgagaccaacctggccaacatggcgaaaccctgtctttactaaaaatacaaaattagccgggcagggtagcacatgcctataatcccagctactcaggaggctgaggcaggggaatcacctgaaccagggaggcggaggttgcagtgagccaaggttgcaccactgcactccagcctgggcaacaagagtgaaactccatctcaaaaaaataaaaaataccaaaataaaataaaataggcattcttgtctcacctaagttggagggaaacagaaaaaaagaacaataaaaataaaaggaaattattggttcctataacataaaaggtcagggttagtctgacctcaggcatggctgcatcagggggttcaaagaatatcatcaggacgaaggctcactctcttgctccctctccgtgacctcaatttgctttcctgtctgttggctttattctctgacaggctttctccaagagggtcactggagtcaacaggcctgtagtctaccagcttggcagccaccatggaaacacaaagatttcattctatttccatcaaagccccagaaaaagcctcgttagctctgattagcccatcttggaccatatgtccatctttgaaccaatcactgtccaagaagatgtgatactctcattgaccagtgttcaatggggacctactctcctagcagtagactagcagaaaaatagtaggacaccctgagattcaccggaaatatcatatgtgagtaaaagcaacaacagccaaagagaacaggaatctctggctgactgagcaggttttcaggctttgttcttccaaagataataagaagtgctaacccataaaacttaacaagcctctctaaggaatccggagttgttatgagttattatatgtaaaaagcacttagaaaaatgtctggcccaaagtaagtactgtagagctgttagcgaacatcacggaagaaggatcctggagaatggaaaagaacatattctagtagtcagggtggaggcacagaattgtttaaatattaaaaggagtgtaacctaattttgtaacaaactggtgaagcaggatatatgagttaaactactttttgcttctttgattcataatttgagaatgacaaaactgttttaaaataaatcttttccgtcaccaacgcaaggggatttgatgtaaaataaaatatctggccaggtgcggtggctcatgcctgtaatcccagcactttgggaggctgaggcggaaggatcccttgagtccaggagttggagaccagcctgggtaaccataggttgaccccatctctacaaaaataagaaaattagctgagcgtggtgatgcctgcctatggtttcagctacttgggaggctaagccaggaagatcacttgaggccaggagattgaggctgcagtgagctatgatcacatcaccacactccagcctaggtgacagagtgagaccctgtctcaaaaaaaaaaaaaaaaggagaagaagaacaaaatatccaatactggttataagatgatgaactaatagatactgcagtctacccttctacaccaaattctaaccacacaaacaacagaagcatattattaataaattaataattatgctcaaaaaccagaaatgcttgctggactggggagagagaacatgctgaaagacagaaatcatactgaggtaggaggcaggtgggactcgtctccagaccagattgaaactgactgaaggccgggcatggtggctcacgcctgtaatcccagcactttgggaggccgaggtgggcagatcacctgaggtcaggagttcgagaccagcctggccaatatggtgaaaccctgtgtctactaaaaatacaaaaatgagacaggcgtggtggttcatgcctgtaatccgagctactcaggaggctgagcgaggagaatcacttgaatccaagaggcggaggttgcagtgggccaagaccgcaccactacactccagtcggagcgacggagagagtccatctcaaaaaaaaaaaaaaaaagacaaaacaaaactgaccgaaaccagtagaggggctgaaagaacctctcactgcccatcaccgtaagacactcctatcagcaccatgacaatgtaccattgccacagcaacacccagaagttactgcccatttcctagctattcctgaataacgtgcccctttaattagcatgtcactaaaagtgggcataaatatggctgcacaccaccctgcactgtcctctcggattgcctccgctgtagtcctgctccccgggagcggtcacagagctgtgacacagccgcctcctcagtaaagttgttttcttccagcactggcttgctcttgaattctttcccgagcaaagccaagatcctgcccttcatcaatactaggttagatggaaaggggaactgtagcctacagtacctgcaggaatacatagaagacttctccctcaggaggaagcaagagcatgccctgaggcgtggtaaccacaggaagcactccacagggagtatggagccgtcacacccagcacacacgcctcccatacacctcacaagcagcccaacccacccactcccaactttcagggaaaacaaatacctatcggccgggcgcggtggctcacgcctgtaatcccagcactttgtggggccaaggagggcagatcacgaggtcagggatcgagaccatcctggctaacatggtgaaacctcgtctctactaaaaaatacaaaaaattagccaggcgtggtggcaggcacctgtagtcccagctactcaggaggctgaggcaggagaatggcgtgaacctaggaggcggagcttgcagtgagctgaatggcgtcactgcactccatcatgggcgacagagcgagactccatctcaaaaaaaaaagaaagaaaataaatacctatcaacccattgcctaggtattatgcccagcaatgcatttgctctttttcctaatgctctccccgcaacctccgccctctcctgacaggccccaatgtgtgttgttcccgtccctgtgtccacatgttctcactattgagcttccacttacaagtgacaacatgcgatgtttggttttctcttcctgagttagtttgctgaggataatggtttccagcttcatctgtgtccctgcaaaggacatgatcttgttcctttttatggctgcatagtattccgtggtgtatataccacagtttctttatccagtctatcattgatgggcatttgggttgactccatgtctttgctattgtgaacagtgctgcaatgaacatatgtgtgtatgtatctttatagcagaatgatttatattcctttgggaatatactcagtaatgggattggtgggtcaaatggtatttctggttctaaacctttgaggaatcaccacactgtcttccacaatagtttaactaatttacattcccaccaacagtgtaaaagcattcctatttctccgcaacctcaccagcatttgttcttaacttttaaataatcaccattatgacatggcacacatttgcccatgtaacaaacctgcacatcctgcacatgtaccccagaaactcaaataacttaatttaatttttttaaaaaagaaaataaatacaaggtgtaaccctgacagcagtggcagcaccctctccccaactgagctgtgaaagccaagacagcagacagtctagtaaataacatcaactgtaaacagctgtgccccaaaaaaaggctcaccaaacagttgagaagttcctaacaccataagagagaaacaaagtcaaaaaattggaggaacttacacccaataaattaataaggtatcaggatatgactttaaaaataagtataatgaatatcttccaagaggtaagtgtgggtagtataatcatgaaacaagaactggaagttactaaatgaagcaattagtgatcttcaaagtaaaaaatgataactgttgaaatttggccaggcacggtggctcacgcctgtaatcccagcactttgggaagccgaggcgggcggatcacgaggtcaggagatcgcgaccatcctggttaacacggtgaaaccctgtctttgctaaaaatacaaaaaattagccagacgtggtggcgggcgcctgtagtcccagctactcgtgaggctgaggcaggagaatggcgtgaactggaaggcagagcttgcagtgagccgagatcacaccactgcactccagcctgggcaacagaacaagactccgtctcaaaaaaaaaaaaaaaagataactgttgaaattaaaactcaatggcaggatggacagagctgaagagccaacttgtgaattggaggactcagctaaggagttctctgaaagtgcaccacatagaataaggctttgtaatgtgaggaagaaacattgaaaaacatggagaacaggtccagaagttctaatcagcttccaacagttcaaaaaggagggactagaaaaatggggggaaggcactatttaaagaaataatgttttgcagttaatcatgaaggaatgaacaaatgctcccttcttcactctcctccctccccactaaaatgccagttgatgggttaaaaaggaagacataagcccaccaatacaaagagagttgcaaagatacacaagtatatgagaaatggcatctggctgggcgcggtggctcatgcctgtaatcccagcactttgggaggccgaggcgggtggatcacctgagttcaggagttcgagaccagcctggccaacaatggagaaaccgtgtctctactgaaaatacaaaattagccaggcgtggtggcacatgcctgtaatcccacctacttgggaggctgaggcaggagaatggcttgaacccaggaggcggaggttacaatgagccgagatcacaccattgcatcccagcctgggcaacaagagcgaaactccgtctcaagaaaaaaaaaaaaaaagaaagaaagaaagaaatggcatctatattttggaagctgaaagcagataaacaaggggtaatcaattcagcagaccagggaaagttaaaagtcaaatgcttgcagtatgtaggaaaagcaataagcacaaacccttagaaagactcaggaaggggagtacagccgtttcccctcatctgtggttttgctttccctggtttctgtttcctgcagtcagccacagcccaaaaataggtgagcacagcacaatcagatattttgagaaaggccacattcacccaacttttattatagttagattgtcacaattgttctattatattctattttattctattttatattagttgttgttgctcccctcttttttcagttttcttttttgcttcttttttttttttttttttttttttttgagatggagtctcgctctgtcacccaggctggagtgcaatggcatgatctcgctcactgcaacctccacctccagggttcaagcgattctccagcctcagcctcccaggtagctgggactacaggtgcccgccaccatgcccagctaattatttttatagttttttctttatttttaatttgcatttatatttgtttattcctaatgttcttaatctcttactaggcctaattgatatattaaaccttgtcatagagatgtatgtacgatataggaaaaaatctagtactgtatccctcagtatccaggcggagactgtttcaggacctcctacagtctaagacaagtcccccctctcttgtaccaaaatcctcagatgctgaatcctcaaatgctgtataaaatggtgcagtatttgcatttaacttatacacatcatcccatacactttaaaccatctctagattacttataataccgaatatgatgtaaatgctatatggaaagttgtaatactatattatttgggaaataatgacaggaaaaattcaaaaattttgaattctggtcagtgcagatgcaaattttttctaatattttcgatacacggtgggttgggatctatgggttctgcccccatggataaggagggctgactgtatctatagatttggtatgtctatggcttcaggcatccactggggatcttggaagttagaaggtctccccactagaaaaagggggctactgtaccaataactactgaaggtaggggtacacatgaggctgaacacagtagaattgattgaaagtctacataaaggccaggcgcggtggctcacgcctgtaatcccagcactttgggaggtcaaggcgggtggattgcctgaggtcaggagtttgagaccagcctggccaacatggtgaaactctgtctgtacttaaaataccaaaaattagctgggcgtggtggcgagcacctgtaatcccggctactcgggaggctgcggaaggaaaattgcttgaacccaggaggcagaggttgcagttagcagagatcgcaccactgcactacagcctgggggacaagagcaagacttcgtctcaaaaaaacaaacaaacaaaagaaagtccatataaaaagcaaatggcccccatattcctttatcatccactaagtcaggcaattctccctcctctccagcagaagactagaagtttatcgtctgctagagcagagggggacgctggacttcggacatcaggtaaatgtgccctgtggaacaaaagaaaatgtaacaaaagcaacacactgaatggtgactccccagtcctcttcaaatactgccaataatgctgatggttgggcatctacaccccaaaagggaaattagaaggttggtctccgaagaaaccaagcatcccaatagaaaagacctacaaatactgactgtgggaggaaccgtgtcaattatcaattgaccagatctctgctcattacattgaaaaaccccaccaacagtccggattatctttttttattgcctcactcttaaataaagtcaaggatcaggggccgggagcggtggctcacgccggtaatcccagcactttgggaggctgaggcgggtggatcatttgaggtcaggagttcgagaccagcctggccaccatggtgaaaccccgtctctactaaaaatacaaaattagctgggcgtggtagcacatgcctgtaatcccagctgaggcaggagaactgcttgaactcaggagatggaggttgcagtgagccgagatcgcgcccctgcactctagcctggcaacagagccagtctcaaaaaaaaaaaaaaatcaaggatcaacagatatttaaaaagagggactcagagaaaataggaataatgaagaaacagattttttaaactatatttactatgttcagaaatactagagaagattagcatctttgaaacaaaagcaggatgttttctgaaagcaacaatcacagaacaagacagaaaatgttcaatagcaaaaaaaagttttaattcaatagaagaggtggaaatttccaagaaagtggtaaaaaaaaaaaagagagagagagagagaggtggagattattagagacaatgacaatataggaagtctttttttttttaatggagtctctttctgtagcccaggcaggagtgcagtggcaccatctcagctcactgcaacctccacctcccgggttcaagcgattctcctgcctcagcctcccaagtagctgggattacgggggcccaccaccgcgcctggctaatttttgtagtttttagtagagacggggtttcaccatcttggccaggctgatcttgaactcctgacctcgtgatccacccgccttggcctcccaaagtgctgggattacaggtgtgagccaccaggcccggccagtatagaaactattaatcagatgtttaagtcactgtatttgggggaggtttgttacagagcttagcctatacctttactaacaaacataccttcaaaactttgagagaagtttatttcccatccaggattctagtcttaggcaaattaccatcaagtttaagttgaatagagacagtttcaaatatgcaagatgtcaaaaaatgtacctcttaaacactccttctcagaaaatgactggaacaaagactaatgccacgtgcatgtgtgtgtacgctaggtgcacaataaacatatatgcccaggcacatcggctcacacctataatcccaacactgtgggaggccaagatagggggatcacttgaggccaggagttcaagaccagcctgagcaacatagggtgactttgtctctacaaaaaataaaaataaaaaaataattagcctggcatggtggtgagggcctgtagtgccagcaactcgtgaggctcaggtgggaggatcaggtgagcctaggatttcaaggccattaatgaagaaactaaagaaggaataaatgaagtgtatcccttcatttgttaaagagataaataatatctactacttagggttttgtgggattaaattgaacacattacttttcttgcttccatcaaaatcatacacacacacacacacacacacacacacagccctgactgtagccaattgttcttgagggtaggaaggcaatgtatgaatcttaagagagtcaatctgcatttttcagtttacagacactggtggagaagtcagtgaaaccagagaacttgaccttggaaaatcattcatttatgttaagaagtagatggcccattattatttacaaaataacttgaagagccattttggttttggaaagagagctggcagagcagagctcagaaaggagatgaaacaatgagagataagttgttttacataatgaaagaatacagactttccccgattataccaaacagaaccaagataaagtaagattttccacaacaaggcactcagggatggcgatggaggcgctgtggatcaagtcagccagagagaaatttctgggggttggaatggttacaaaataatgttaagaatatagccagctgtgatgccacaaccctgtgatcccagctacttgggaggctgaggcaggaagatggcttgaggccaggctttcaaggccagcctgggcaacatacgagatgctgtctctgaaaaaaaaagaaagaaagaaagaaaagtatgttaggaagatgatagatggctaatatcaagctttacagttgatcctgttcttatttaaaattctaatagtttgttcattatggatttcttccattcattttggtgttttaaatattgcattaaatcgttatttattttgagcactgagtttttggtgcccccttaaatgtggcactcaaggaaagtgcctcgctagtttcaccctggtccctgcccttctaaaccttcaggaaaagtctgtgacatggaccagctctgtgttaatgatagctgccaaatagggatcagctcagggtggaacaaagacaccatcagcagcaggcaagacatgaaaattctctatcaatcagtgacagcgatttgaacaatgaaggattacaaggtaaaccttagagcaaagagaaaaataaacagagcatggaatagtgacggggtgttgccggggatcccagagaaggggtgaagttttgctgcccctcatgcccactgttggaccctacagctcaactgttcttttagctgagcttcttccagatagaatgaaaaatacaaaatactctggctggtcttccagctgggtcctgaaaggagagtccgagggttgggtgttgtgtccctgaagactagtctagcagtgggggcttgaaggggggtgccaggatgggcctcccaatctctttacggaaatgttagaggccgggtgtggtggctcacgcctgtaatcccagcactttgggaggctgaggcaggtggatcacttgaggtgaggagttcaagaccagcctggccaacatggtgaaatcccgtctctactaaaaatacaaaaattagctgggcatggttttgcatgcctgtactcccagctactcagaaggctgaggcagaagaaccgcttgagcctgggaggcggaggttgcggtgagccgagatcgcaccactgcactccagtgtgggtgacacagtgagaccctgtctcaaaaaaaaaaaaattaaaaaaaggaaatgtcgagtagagccagctccagaataagtgaatggaagacgttcaggtgcatgcgttcaggcggtaaattcatgatcaccaattttcacctagtgtctcagccatgccaagcattcctatcccagcccctcattcagctctctctcttatgccctcagagtctattcaaactttctccactctccttctatctctgaaatgcccctacaacttccttgaccctcagaagccagatccttgccaagcacttcacaaagaaaatgcaattcatcaaatgggatatttccccacacgtcattttcaagttgatttgctgccaattccatttgttttgctttgtttcctattacgaaggaagaattgtctctcttacttcaggccatgttcctctacttttttccatcattgcccccttatggagcctttatgacttttttttttttttttttttttgcgaaagagtttcactcttgttacctgggctggagtgcaatggcacaatctcagctcactgcaacctccgcctcccaggttcaagtgattctcctgcctcagcctcccaagtagctgggattacaggcatgcaccaccacgcccgactaattttgtatttttagtagagacgggggtttctccatgttggccaggctggtctcaaacacccaacctcaggtgatccgcccgcctcagcctcccaaagtgctgagaattacaggtgtgagccaccatgcctggccctaaggcattttttcctaattgctccccgctcctgctaccttgtgaaattttaaccccttaatatatgtttgtgtactctgaccctttcgagggccacgaatcattgcaatatctaagatgtggttgcccactctgagaatgcacgatctgtctacggctatagcaccctgaacacatccaatctcatcggatctcagaagctaagcagggccaggcctggttagtacttggatgggaaaatgcagatgtaaggccagttcctccacgcattctccagattttatctcctccctcgggatcttcccctcatcacttacacccaaggcctccagcatcttaacctgtccctctcactagctctactgactacccatctccagctctggccttctgtttgttaccttcacagccctatttctcaaaaggcatgctacactccaaaatgcactctgcctccatctctccactgactctattctctgtaatatcacaaacacactctgtgtgcccacacacacatactctttcacccagcattccctcataagagcacattagcagcccttgcctaggacgtagcaatactgaatgatgtgtttcaccagaactgtttataatcagccaaagcctttttcccaactttactgaggtatgactgacaaataaaagttggctattttagggtgtatgacgtgatgtttactatatgcctacaatttgaaatgattgccacaatcaagctaattcatatattcatcacctcacatagttaccttttttccattgtgctgagaacacttcagcacatttccagtataccatacattattattaactatagtcaatgctatggtttggatatggtttttttttgtttgtccccatcaaatgtcatgttgaaatttaatccccaactggtagcggtggctcatgcctgtaatcccagtactttgggaggccaaggtgggcaggttgcttgagtcaaggcattagagaccagcctcggcaacatggtgagaccctgtctctacaaaaaaaaaaaattagccaggcatggtggcacacacctgtagtcccagctactagagaggctgaggtgggaggatcgcttgagcccagggaagtctaggctgcagcgacctgagactgcaccactgcactccagcctgggcaacagagtgagaccctatctcaaaaaaaaaaaaaaaaaaaaaagaggaaatgtaatccccagtgtagcagtattgggaggtagggcctagtgagaggtgtttgggtcatggggctggacccctcatgagtggcttggtgtgcttctcacagtagtgagttctcactctcatgagcctggattgattctcggggaaatgaattcattcccatgagtgtgtgttgttataaagccagggtgccccttgggtttggatcctcttcgcaggtgctcatttcccctttgaccttttccaccatgttttaactcatcacaaaagccttcactggccaggcgcagtggctcatgcctgtaatcccagcactttgggaggccaaggtgggcggatcacgaggtgaagagatcgagaccaccctggccaatatggtgaaacatggtatctactaaaaatacaaaaattagctgggcgtagtggcgctcgcctgtagtccacctacttgggaggctgaggcaggagaatcgcttgaacccaggaggtgaaggttgccgagagccaagatggcaccactgcactccagcctggtgacagagcaagactccatctcaaaaaaaaaaaaagaaagtgagatagccttattactgatatggagaaagttttagtggtccggatagaagattaaaccatccacaacattcccttaaaccaagcctaatccagaacaaggctcgaactttcttcaaatctgttaagggtgagagagataaggaagctgcaggaagctagcagagttggctcatgaggtttaaggaaagtagccatctccataacataagagtgcaaggtgaagcagcaagtgctgatggagaagctgcagcaagttatccagaagatccagctaagatcactgaagaaggtggcaacactaaacaacggattttcattgtagtttaaagtcttatattggaggaagataccatctaggactttcatagctggagaggagaagtcaatacctgccttcaaaacttcaaaggaaggctggacgcagtggctcacacctgtaatcccagcactttgggaggctgaggcaggtggatcacaaggtcaagagttcgagatcagcctggccaacatggtgaaaccccatctctactaaaaatacaaaaattagccaggcatggtggcacatgcctgtagtcccagctgctcggggggctgaggcaggagaatcacttgaacctgggaggcggaggttgcagtcagccaaaatcgtgccactgcactccagcctgggtgacaaagcgagactctgtctcaaaaacaacacaaaaaaaaacttcagagggcaagctgactctcatgagaagctaatgcagctggtgactttaagctgaagccagtgcccatttatcattctgaaaagcctagggcccttgagaacttggctaaatctactctgcctgtgtctttacatggaacaacaaagcctggatgacacatctgcttacatcatgatttactaaatattttaaacccactgttcatacctactgctcacaaaaacattcctttcaaaaatgactgttcatggagaatgcacctggtcacccaagagctctgatggagatgtacagggagattaatgctgttttcgtgactgctaacacatcattcattctgcagcccaaggatcaggagtaattttgacctgtcactgtaattattttaaaaaacagggccgaggcaggtgtatcacctgaggtcaggagttagagaccagcctggccatcatggtgaaaccccgtctctactaaaaatacaaaacttagctgggcgtgatggcaggtgcctgtaatcccagctactggggaggctgaggcaggagaatcacttgaccccaggaggaggaggttgcagtgagccgagatcacaccattgcactccagcctgagcaacagagcaagactctgtctaaataaataaataaataaataaaaataaacaggggcccagacatggtggctcattcctgtaatcccagtgctttaggaggtcaaggcaggaggatcacttgagcccaggtattcaaaacaagctgaataacataataacatagtgcaacctcatctctctacaaaaaatttaaaaattagccaatgcagtggtgtgcacctgcagtcctagctactcacaaggctgagccaggaggcccactcgaaccaaggagctcagggttgcagtgagctatgatcacaccactgtactctagcctgggcaacagagactctggctctaaaatttaaaataataataataataaagtaacaaagaaacaaatacatttcataaggctatatagctgccatagatagatctgggcaaaatgaactgaaaaccttctagaaaggagtcaccatttagatgccattaagaaaattcatgattgaggccaggcactgtggctcatgcctgtaatcctagcactttgggaggctgaggcaggcggatcacctgaggtcaggagttcgagaccagcttggccaacatggtgaaaccccgtctttttttttcctgagacagagtctcactgagtggcccagtctggagtgtagtggcatgatctcggctcactgcaacttccactcccaggttaaagcaattctcctgcctcagcctcccaagtagctgggattacaggcacccaccaccacacccagctaatttttgtattttttagtagagacagggtttcaccacgttggcctggctggtcttgaactcctgatctcacatgatccacctgcgtcagcctcccaaagtgctgggattacaggtgtgagccaccgcacctggcctgaaacccatctctactaaaaatacaaaaattagccaggcgtggtggcgggcacctgtaatcccaactactcgggaggctgaggcaggagaatcgcttgaacccaggaggtggaggttgcggtgagcagagattgtgccactgtactccagcctgggcaacaagagcaagactcagtctcagaaaaaagaaaaagaaaaaagaaaattcatgattcaatggaggaagccaaaatatcaacataacaggagtttggaagaagttgattccaacccttatggatgactacaaggggttcaagacttcttggaggaactaactgcagatgtagtagaaattgaaagagaactagaattagaagtggagcctgggacgggcacggtggctcacgcctgtaatcccagtactttgggaggccgaggagggcagattacctgaggtcaggagttcgagaccagcctgcccaacaagacaaaaccccatctctactaaaagtataaaaattagccaggcatggtggcgggtgcctgtaatcccagctactcaggaggctgaggcaggagaatcacttgaacctgggaggtagagattgcagtgagccaagatcatgattctatctcaaaaaaaaaaaacacacacagaaggtaaattgttctgcaaagagaggtaatgggaatgtgggagttggcttggctactggcacagacagcagggaatcgggagtttgaaagaagatttacatttggcatacacgtgtgcccacgtggcctttcctactgcaaagggtgctgacaaaatcaagcccctgatccttcctgtggcatacataagaacaaaatggtagttgttagggacaaatcaaaatttaaaaataaaatggccaggtgcagtggctcacccctgtaatcccagcactttgggagggaggccaaggccagcggatcacttgagcccaagagtttgagaccagcttgggcaacatggcaaaaccccatctctacaaaaaatacaaaaattagtcgggcatgttggcacgggcctgtagtcccagctactggggaggctgaggcagtataatcaatcacctgaacctgggagatcaaggctgcagtgagccgtgatggcgcctttgcactccagtctgggtgacagagtgagaccctgtctaaaaacaaaacaaaacaaaaggctgctagtcagtttgggctactataacaaaacactggccaggcgcggtggctcacgcctgtaatctcagaactttgggaggccaaggggggcgggaatcacctgaggtcaggagttcgagaccagcctggccaacatggtaaaaccccatctctaccaaaaatacaaaaattagccaggcatggtggtgcgtgcctgtaatcccagctactcaggagactgagacaggagaatcgcttgaacctaggatgtggagattgcagtgagccaaggtagcgccattgcactcccgtctaggcaacagagcaagactctatctcaaaaaaaaaaaaaattaaaggcttagttctccatgttgaaagtaagggaagagacttctccaccctctcttttcttagaaaatttgctttagaaaacttgtaaaattttttttttttttttgagacaaagtctcactcttgttgcccaggctggagtacagtggcacaatctcagctcaccgcaacctccgcctcccgggttcaagcaattctcctgcctcagcctcccaagtaggtgggattacaggcatcctctaccacgcctggctaattttttgtatttttagtagagatggggtttccccatgttggccagactggtctcaaactcctgacctcaggtgatccacccacctcagcctcccaaagtgcggggattacaggcgtgagccaccgcacccagccagaaaacttgtaagttattttctgtgtcttcaaaacgtgtataaatatttttagaagccacacagcctcttgccagctttactacccagggatgtctttcacaaagacccaggagccatctccttgaaatgtaaacaccaagaaagatggagccttcatttcccagtttctgtgggagggtaggactaacttaaatggacactttgcttgagctgcaaaactatctgctgtcataaaaatctgaaaagctggctgggcatggtggctcacgcctgtaatcccagcactttgggaagccgaggtgggtggatcatctgaggtcaggagtttaagaccagcctggccaacatggcaaaacctcgtctctactaaaaatacaaaaactagccaggcttggtggtgcacacctgtaatcccagctactcaggaagctgaggcaagagaatcgcttgaacctgggaggtggaggttgcagtgagccgagatcacgccactgcactctagcctgggcaacagagcaagactctatctcaaaaaaaaaagagaagtttttcttctgattaagccagttagctaacatagatggtcatcacaattgccaggtgtctctagactgcactatatgtgacaaatggtgctatcgagtcctcctaaagattatttatagtttatcttgagaacacatatgtaatgggctgtatctgcttggctagataaaagtgagacttccttctgtctttgcagtctcttagcaaactgcctgtgatgtgctcacattctggtttaatgcttattcaataataaaactgttttctttcttcactactttcgtggagaggttttttctgggttgggagaaaattttgcttctaattatattctcccaacatagcgcatgtgcttaaaagggaaacaaaagcaggagggggaagggtctagagtgataagagctctagtgagaggctaggcctagagagggacatggagaaatagcatgcggagaggaacggtagaggagcaacgctaacattcagttgtaaataatacaatcatagcagctaatacatagagggactacacgccaagcactgttctcactgtttagccatattcactcatttagcatgcgcagtagcttgaatccggtttttcaattattcattccctctctctgcacgtggccgtagagtacactagagtgggcagaaaataagtcacaaaacagcaaagaaacagtgcttttggaagtaggtatgagacaaactcttttctaggcaaaagtaacccacgaaaatgtgtgtggaaaggccagatcctactattaggcaggatgggaatttgagccattttatttggatattacagaatggggtgaccccagaaaactggaagaactggggaccagcaaatggccgacctgcagtcctgagcagaggatgtaggccagagtggacctagaagataagaaagggaattgaatccagtaagggacagacactttatttttttatttttatttatttatttatttatttttgagatagagtctgatctggaggctggaaggcggggctaaaactcccactcacttacctctaccaacaactaggccaccaagtcatttctgaggactggctcaagaaagcagatttaacttacactggcctagcccaggccaccagatgcatccacggagatccaaatgcatataatcacttgaatcaagatctagacagggacgcgtgcagcaggcttcatctgactgattcctgacacgggagagaaagcctaagctccgaatcatccttcaatgtttacaaaggccctaaatagcagtgggctaattgctgttcctggatttccaggagacctgagacccatgaaggagcaggaaagagcttggggataaaaaattaatctggaacctactggagcggaaggggctgcactcacctggaaaagacaaagttcttgggaactggccacgtaggccaggtccctaagcaattccatcccgcaccctaacaccccgactggtgttcctgggtccctaacattgtctgtacccgcttcggaggttggacaaaatgagtttttcactgccctgcctcaggcctctctcaaaggtctggcccatgatatttggtgtacattgggaccccagcgcccagatatttgaaacggggtggggagcgggtgttgagctgctacatttccaggttctaggtaccctggggaacccctggtcgttgacggaagcacagcgttcaagggcggcagagctcaggtactggaggacacatgggccgcgccgggtctagccgcgggacatccccagaccccagcacggcctcccaggccgaccttccagaagccggcccactgccttccccgggtcccagcccagaaaagcggagaccttcccctccgtttggaagatggactcatcccctacttcctcctggctccccagaagacctggagacctcgggaagtgttctcatctatgttcgctccaacccgggggctcaggcccacctcgatcccgccttcccgggaggtccaggaaggtcccgccgcacccaccccgttggcctcaccctggctcgggcccctttatcatcctgcagctacgctccgaccaggaggcacagccagtccccacagccggctctaccgctctgctcgcaggtttgggctagtctggggcggggacttgggagcgcctaaaacttgcgaggagggcggggccgcagaccggtcctttaaaggttggaagtggccccgaggcgccggcagccctgggcggtcccgggaatcgcacaggacccggctcccctcgcctaagctgctggggggcgccatgggccgctaccgcatccgcgtggccaccggggcctggctcttctccgggtcgtacaaccgcgtgcagctttggctggtcgggacgcgcggggaggcggagctggagctgcagctgcggcccgcgcggggcgaggtcagcgcggggagcgaggggagctagggcagcggggaccccgggcccaggcccgggccgagctgggctcgcggcgggagggcgggaggctgggggcgaggtgacagcgcgacctcgcggactgggacttccacgaagctgggacgaggtgggcaagattagggacagggtccgcagctgggatcccgggctgggctcaaccccatctccctttcccgcccctggtcccggcagcccccagctccttctcccagtgacccagagccaatgtaagtatgaggccagaggtcagacgtgaagctcctccaagaaccggcgcggggagagctcagttaatgggacccacgtgggcgatgctgctccagcatcagctccaggcgctgcgggccctcgtcctccacccgactccgggcgtctgagacccaaagagcaggttgtgcgggggcgggaacgaggcgatgctgtctttggaggccctgagaaactgaggttgcacaggagcgcggctctgtcctcgaaacggcctcagtcgggtccctcctactaagtctggcctgggtccggcctgcacaggaggaggagtttgatcatgacgttgcagaggacttggggctcctgcagttcgtgaggctgcgcaagcaccactggctggtggacgacgcgtggttctgcgaccgcatcacggtgcagggccctggagcctgcgcggaggtggccttcccgtgctaccgctgggtgcagggcgaggacatcctgagcctgcccgagggcaccggtgagcaggcggcgtcggggaaggaggcacaaggtctcgggaactgctgcggggctaggagggcagagttaaggacggtcggagcagacttagaggatgtatgggcccagggcaggtgaaatgtagggatcccagggtgctggacagaaaacgggaaggagttatgaattcccaaagttttacacaggctaagagaggctgcgtgtgaggctggaggcagggagtaagtgatctggagatcccatcttccaagaaggcaaagacagaaagtgggagttgcagcgatccaggaaaacagagaagcaaagtgaaagtaggaaggagatgtaaaggtgactcagaagtcaggtgaggggaccacatggaacaggagggggtgggtgacccgtgagagcagacagctaagggaagaaaacataggatgctggagagctggtttggttggaataacacggaagacacccgtgaaagacaagaagcacactggcccgcaggagacgaggaggaatgaggatggcaaatagtgaattttttttttttttttttttgagatggagtcttgctttgttgcccaggctggagtgcagtggtgcgatcttggctcactgcaacctccacctcctgggttcacgccattctcctgcctcagcctcccgagtagctgggactacaggcaccccccaccacacccggctaattttttatattttttttagtagagatggagtttcaccgtattagccaggatggtctcgatctcctgacctcgtgatccgccctccttggcctctcaaagtgctgggattacaggcttgagccaccacgcccggcccaaatagtgaatttttaaccatgggtaatgagtaaaagagagatgaatccagagatgagtgagggcagtagggatggaacatcaaatctatgactttgagacaggtgagtgtaaatgcagaaaagacccagaataagtccatagatacagattatgatagtaaatccagaaagatgaggtttaaaaaaaaaaaagcaaatgtagaatcttttgaggacaggtgaaggcgtggcaggtgaggtttaagatgtgaaattaatcaaagcaatctgtagtagacagtaggtgtaggtgtataggtgactaagatttcatcaccttaattaaggtgatttttttccaaccatagatattgatgaagtaaggccaggtaggggaagatgagtgaaggagcaagaaatggtggcaaacaggaggtttttatctacaggcaaaggatgagggctgaaataagagaaagcaggagtgcaaagttggcaaagatgggataaacgtgtctggtggataatcaaatgaggcaaagccagagataaaagcaacagtgcatggctgaaaacatggaatacggctaaccacagggagatgaggacaagaggcgggcataggaccagacagagccgtgaggccaattgtcttgatgtctccccagcccgcctgccaggagacaatgctttggacatgttccagaagcatcgagagaaggaactgaaagacagacagcagatctactggtgaccacccaccccttaaactaaccccgccaccactgtcccaccccttccctgcccctgcccctgcccctggccccatcactgaccatgacatccttcctgaagctttgtccccaactcctagctgggccacctggaaggaagggttacccctgaccatcgctgcagaccgtaaggatgatctacctccaaatatgagattccatgaggagaagaggctggactttgaatggacactgaaggcagggtgagaaaaaggctagacctcggagtgaaataagggctgggagggccaagaatgatgatagacggtgagggactgagggatcagctgatgagttaagcctcaatacctgtcctagggctctggagatggccctcaaacgtgtttacaccctcctgagctcctggaactgcctagaagactttgatcagatcttctggggccagaagagtgccctggctggtcagtggttccccgaggtctccataatcccttaatggcccctctggatgactcatcacactccacagtcccccgtaactctttgcaagaagagaccttatcatatctggtcaactcagagaggccttgagaatgaaaacgcagaagctgggttcagggagggttatatacctgaacccctggggtagattttggagaagggatatgcaggctgtggtacatatatcctcctttcaccgcccaccaaagagaaggttcgccagtgctggcaggatgatgagttgttcagctaccagttcctcaatggtgccaaccccatgctgttgagacgctcgacctctctgccctccaggctagtgctgccctcggggatggaagagcttcaggctcaactggagaaagaacttcaggtacctctccttcccctgcctggcactgttctctccttagtagtgtggtgagaacggacagagagaatccaaactgagtcagaggaaggctgcagtactgcattgccccttggtgcagtcctgtgctggaaaaatacagaaataaaatatgtaggggaagaaactatgaggagctcccagcaggaaggggaaaatagaatggatccccagcacacagagaggggctggagatgttagcaggaacagtgacattgcctggccgcagtgttctggactccagtgttcatgggcagggagaaaagtgaggaagtgccatcaggtggggagaatcggggaggctttctagaaaaagagagcggggtttggaagcaatggactgtactgaggacaagcctaggcaaaatgtgtgcgtatgcatgtgtgtgctgtatgcggtggcaggggtagtaggggaagctctctggaatatttggcagaggatgtgagatttgaatagggaatgaaagagcatttgctgagctgataggagccaaaaccagagcgcagaccattcgggaatgatcagaaaggggcctggccatttgacaggtggtcagtttacaatgcctgtgatgccaactggattgagcaggcctggttccaaacccagatctgccaccacatccacacacaagacatctaccctcaccagactgtttcttcactttaagatgagaggaactggaccaggggctctagttctcccaacagggctccggtactgatgcaggagaatggcaagaagctagactaaatctcttgccctttgccccggccccctgggggtagactttgaactctaaaaatggatacatccctcctgtccccagaatggttccctgtttgaagctgacttcatccttctggatggaattccagccaacgtgatccgaggagagaagcaatacctggctgcccccctcgttatgctgaagatggagcccaatgggaagctgcagcccatggtcatccaggtaagggccccagacctctcccacaacgttgcactctgttcacctcaacctctgctcccagggacccaacccccagctcttggctcccaaaccccatcctcactcagtgagacttgtcttcatgtcactatttgcctgtaccctcgtctcccctgcctcatccaactagaattactttttcaagagtcaaaatggcctcctggagttctcatcctgtatccaatggtcctcacacttcagtgtgcatcagaatcacctgaatgcctgttgaaatgcagatttctggatcccatgaccagactttctgattcagtatgtctggggtgggaactaagagtttgcgtttttataagttccaaagtgatgctgacactaccagttcaggactacactttcagaatcactatctcatctctcagtggcctctggctctgaaccctcgccatctcttgaatatcttttctcgcaatttcttttttttttttgagacagaatctcactgtgtcactcaggctggaatacagttgtgtgatcttggctcactgcaacctgcgcctcctgggttcaagcaattctcccacctcagtccctccagtagctgggaccacaggcatgtgccaccatgtgggcctggctaatttttgtattttttgtagagatggggtttcgccatattgcccaggctggtcttgaacttctgggctcaagtaatctgcctgcctcggcctcccaaagtgctgggattacaggtgtgagccactgcacctggccttctctcactattcttaacagtcaggtgacaagaactgtcaataatcttacacctcctacttctccttcacattccaccaccatctgagcgccgaccccaaagcagcaggtttctcccacaccactgttagggcctccttctggacccccttcttccagtccctcctgccttccacctgacatcagggcactccagctagcgagcggcaggctgggagggttcacagtcctcctgctagactataacctcctagaaggcaataatcttacttagtcatctctgtttccccaagaatgctgactataatgtcatatacggaatgggagttcaataatttctctttctcccagattcagcctcccaaccccagctctccaaccccaacactgttcctgccctcagaccccccacttgcctggctcctggcaaagtcctgggtccgaaattcagatttccaactgcacgagatccagtatcacttgctgaacactcacctggtggctgaggtcatcgctgtcgccaccatgcggtgcctcccaggactgcaccccatcttcaaggtacttattaatctattaaatcacatatccctcagaccccagagagaggaacagccccatatcaaaagatattgcagcagcaaaaactctttgtagcaatttgtgagtgaagaggagactgtctcaatatcttgagatgttgattttaattaagtttattaagtttagtcacttaacattatataggaatcctctgaaattctcagagatctgacagtctagcagtgcgctcacagtagggcttgaacactgctagtaaaacaaaagccatattcctaccttagatctagtatttagccagaaaaacaagtgatgcccataagaaccaaccagagaacagtatctggtactagagtttgaaatcacaagggacagcctataacagtatagtattgatgaagaatgtttctacccaattgaggagtcagctaagtagaaacagaccaaaaggcaaggaagaacagccagcaagccgctcatacctgcccaacagtaaggtggatagagatgtatgttagcatggtaatgacaggaatgaaaaggaaagaatctaaaacgtagtgaagggaggaaatggtagctgcagcgtgcctgggtgcaagagagagaaaagccagaagtccaagcttctgccacacctgtaagtccctggggcaggtgtgttatactgacctagaaatactgtggttttaagagctgggtgtggtggttcacgcctgtaatcccagtgctttgggtggccaaagcagtatgattgcttaagaccaggagttcaagaccagcctgggcaacacagcaagtcccggtctctaaataaaaagaaagaaagaaagaaatactgtaattttataaaacagtgagttccatatatattgctgggagaaggcaaaataagacctgtgcttgcttaagaaaatgttcttaaaatcttgatgatactttatatacagggaacttggcagagggagcacaaaaatgatacaagcttacaaaccagagtaattgtcagaaacagtaaagttagaagaaaccagagtcagcaaaaatgaggtgtttggttttaggtacatggagtttgatgtattggcaagatatgcaagtatgtcctgggtaaaaacaaccaaattgtgtttcagctgggggcctccaccaagaccccccaagcctggccagtatagctgtgccgcctctggaattttccccttcggtaacatagacaagatggagaccagtctgatgaatggaatcttggatttcattcatctcatgctgtctcctgcttccccatcctctgctccacacgaacaagtgaagcctctattcacacttacaattccgtttcctagttcagtcctctccgtgtctccactcaccacagtaatgccatgccccagcggacagctgagttgctggcagatgcacacaagggtcaagcctgcacatgtcttaacagtggcctatgcaggctctgactttggattgctggggtcttagtcctgaaccccggcctcaataatttccagatgtcctcacatgttccatcgtgaggttattaaaggttaaaatgacttaatggtgtgacacaagctaaatgctacaaaaaacattagttcttgcaaatttttttttttcagagacaagttctcactctgtcacccaggctggagtccagtggcgtaatcataactcactgcagcttcaaactcctgggctgaagcgatcctctaacctcagccttcagagtagctgggactacaggtgtgcaccaccatgcctggctaattttttttattttttgtagagacagggtttcactatgtggcccaagctagtctcaaattcctgggctcaagcgatcctcctgcctcagtctcccaagtaacctggattgcaggcacatgccgccacacccagctagttcttgcaattattattattaaggactgtttatccttaggcatcctttctcctcatgtggactttggcctttccgtgacatttggcatctttcatgaatcttctgaaaagcttcaggttaatgtgagctgctttggtatcttaacaccaaaggtgtcattggggtcattgccagtgtccagcatcaacaattcagacaagcaccaaaactgcttgaaacctgcatgttaactatgtggaaaggaagacaaacagtctaagataaaaagaaacgcatgtaaggaccatgccttttttaatagctaaggaaaatattttaatatttttaatttaataaattttaatttattaaaattaaaattttaatttaatattaaattaaaattttaattttaattttaaataaataattaaaatttaaataaatttaaatttaaaatttaaatttaattttaaataaacatttaaatttttaattttaatattaaattaatttaatttaatattaatttaacttaatttaatttaatattaatttaacttaatttaattaatttaatattaaattaaattttaatatttttaattttaatattaatttaatattaaattaaattttaatatttttaattttaatattaatttaatttaatttaatttaatattaattaatttaattttaattttaattgcttcaatattaaattaaattttaatatttttattttaatattaaattaaaattttaatttaaaattaaatatttaatattaaattaatttaaatttaatattaaattttaatagctaaggaaaatattttaatattaaaaaaagaccatggccttttttcaatagctaaggaaaagcaggagaagaggggcccaacagtgcttaagtaggggtggagaaagatttgcttaaacaggtagctgaatatagctcttctagttctgacagaaagtattctccccatccatcccctaaagaaacccccaactgtgaaacaactaaaagatggagatgcagctttgatcataagcagagaggctagtttaagaggatgtgaatgacagaggaggtagcaaagaaaatcagaaagggctgattcataaggcacctatactcaaggtagaaacaatgaagcagacagctactattccaggactcttatgtgtaatagacactctccaacatcacttaggtgagcatcaccacagcccctgagataagagagtctattgctgccccctgttgacaaatgaagagattgcagattaaaaggttattaacttggccaagtctcaaatgaggagtaaagtgtaggttaaaatcctggtcagtctggctccagggcccaactcacagggaagttggagagcacaagagtgagtgatcagaacagcaggagatcagcctgtaaaggaaagcatcaagaggagaaggcgccatgctgggtgccaggccctaccaggaaggacccaagcatggcctccaccagtcacgccctccaatctcctcctctccagttcctgatcccccatatccgctacaccatggaaatcaacacccgggcccggacccaactcatctcagatggaggaatttttgataaggtgaggagggtacggggcatgggactgcctcatccatctctccatgatctgccactttcaggatccaagatcaactatgtgtgaatgtcctcactcttaacctatgaacctgtcccttttatacccatgtcttttttttttttttttttttttttgagacagagtctagctctgtcgcccaggttggagtgcagtggcgccatctcggctcactgccatctccgcctcctgggttcaagcgattctcctgcctcagcctcccgagtagctgggattacaggcgcccgccaccatgcccagctaatttttatatttttagtagagatggggtttcactgtgttggccagactggtctcgaactcctgacctcatgatccacccacctcagcctcccaaagtgctgtatacccatgtcttaatatctgaaaatcccacatttgccccactttatggaagatgtgttggttctccagccctgtttccccctctaagacctgtgatctcctgtcccaggcagtgagcacaggtggagggggccatgtacagttgctccgtcgggcggcagctcagctgacctactgctccctctgtcctcctgacgacctggctgaccggggcctgctgggactcccaggtgctctctatgcccatgatgctttacggctctgggagatcattgccaggtgagtaaggaggagctgagaaatggtggggccggggggggggggggctctggcctgaggccagcatggggcaaaagcaagaaggtccagaaaggagaagcagagaactcaatcctggggagagatgaggaaaagtgaggacacagtgggtggctctgaaaatgaggagactgggatgaggcagagagaggaggtgaggggagctgtggggggagactgggggaggtgtctggaaaaatcaggattttctgacgatgtatgacagcaaccatgcgaattcctagaactaaggacccacatcttccatgagatgctagtgtgtttagagggctgaggatgtcccaaaggcgaggtgtcttcccagatactgtggaagcattgggcagatgccacagaaagaggaatagaggtcagaggcgggggctttctgccctcaagtgccttttccccctgggcaggtatgtggaggggatcgtccacctcttctaccaaagggatgacatagtgaagggggaccctgagctgcaggcctggtgtcgggagatcacggaggtggggctgtgccaggcccaggaccgaggtaagatccattctagagacagaagaagctcctgggagactctgccagggcgccttcccagccctgcccttctggggacaggaccccagcctctcatcacgcctcccttcctccctccacacgggaaagcatgtgtatcccattcccacctcctccgactcaggacaattctagagacccaaggactgtcctcctcagagaccctggccatcaacccctagtcccactacaccccagtcacagatgcccctgaactgccatatcctggggccccccaggccatatccacagctgggaggggtctgcacagtccctgctgggctcatattctctcctgatggttccgttttcctaactgaggatgtaaatgggaagattttccctccgaagcccacaaggacccaccctggctttccctccctctcttcctgcctgccactgtgcagcacgcacagagggtccaggaataccgcacgcttgctacagtgcaaggtcagctcttgatgcaagctcaatcctatacatgctttgcctcaaacccaaactcagcaccctgatccttggggctcaggtttctttggctaatccaactcttccaccctaaccaccccttggccaaaatctagccactacctttagtcaactctcactccccacatttgaacctctgaggaagaaaaagcctttgctgagctcttaggtttaatcacacaggcaccagcctggactgctgtcactcatccttcggcccctccccctcacacttcagatctaggctgtgaataccatcctctgcctctgtgagacaactacagacatttactggggagcccttatggcgaatcctgggaatgtggcaaacctccttaccctggagggagcctctccctggggaatctgcaccaccctacccttccaggaccaaactctctctagttcttctcagtacagtcccttaggctcctagcagtttgggctactacaacaaaacactagctgggcacagtggctcacgcttgtaatcccagcactttgggaggctgaggtgggtggatcacgaggtcaggagttcgagaccagcctggccaacatagtgaaacccgtctctactaaaaatacaaaaattagccaggcgtcgtggcacgcacctgtaatcccagctactcgggaggctgaggcaggagaatcgcttgaacttgggaggcggaggttgcagtgagctgagatcacgccattgcactccagcctgggcaacagagcgaaactccgtctcaaaaaaataaaataaaaaaaaccacacaccatagactgggtggcttataaacaacagaaatgtattcctcacagttctggaggctgaaagttcaagatcaggttctggtgagacccctcttccaggctgcccacagccgatttctccctgtatcctcacacagcagaaagatagcaagctagcactctgtcctctgctcataaaggtatcaaacccattcaggagggctgcaccctcacaccctaattatcatgtggggctccacctccaaataccatcacaataggattagatttcaatataaaaatttttcggagccaaagacattcagttcatgacacatgttaactttaacctccactaaccaccctcccccctgttctctttcagttctcatagctcacttttgtctagttttcccagcagacattttagaggctaaaattaaaaatgccatgggattagcagtcaggaacctgagttcaagatcagcctctgccttttcccaactatgcagtcctgacagtttattctctatgggctttgattttcttacctataaaatgagagtaattatatttattccacttaactgataagattattgggtctcccagcactttaggaggccaaggtgggcagatcacctgaggccaggagttccagaccagcctagccaacacggtgaaactccatctctactaaaaatacaaaaattagctgggcatggtggtgggagcctgtaatcccagctacttgggaggctgaggcaggagaatcacttgaacctgagaggcggaggttacagtgagccgagattgtgccactgcactccagcctgggcaacagagcaagactccgtctcaaaaaaaaaaaaaagattatcgggtctctgagcccccatatccactgcaaaatgagtggactgagataacctttgtgggagcccctctcagctgtgacactggaaatccatgacttattccccacattataacgcagacacttgtaattctgtctgggaataggattacgcattcctaaattatttatttattttttaatttttaaatagagacaggctcttgctctgtcacctgactaccagcaatcctcctgccttggcctcccaaagtgctgggattacaggcatgagtcaccgaccacgcatccctcaattggtttttttttttttttgagacagactctcgttgtgtcgcccaggctggagtgcagtggcgggatctcagctcgctgcaagctctgcctcccgggttcacgccattctcctgcctcagcctcccgagtacctgggactacaggtgcccgccaccacacctggctaacttttcgtatttttagtagagacggggtttcaccgtgttagccaggatggtctcgatctcctgacctcgtgatccgcccatcttggcctccccaagtgctgggactacaggcgtgagccaccgcgcccggccgcatccctcaattcttaaccactttttgaggcaagggatatttggtcactcagaacttttcagcccccaatccttccataacaataattattacttacttattgagcatttattacagaccaggtgattttgatacatcatctcatttataatgtaggtatcgtccatattttacaggtgaaaaaaactgaggttcaaataggttaagctggcctatggtaactaagtgtaagtgactgagccaggacttaaacgcatgtctgatgcaaatacgtctaaataaaataaacaaattcatcaattctaaaatatgggcatcccaaaacaacagcctttgttcctctcctcttatgctgtagcttctaactgctattcctttcctgcccaggtttccctgtctccttccagtcccagagtcaactctgccatttcctcaccatgtgcgtcttcacgtgcactgcccagcatgccgccatcaaccagggccaggtatggacagctgaaagcccaggtccctgaaggcaaggtgacctgagggagagatgggagttcaaaccctaagtaccagggttctagggttacagtttcttcctccagctggactggtatgcctgggtccctaatgctccatgcacaatgcggatgcccccacccaccaccaaggaagatgtgacgatggccacagtgatggggtcactacctgatgtccggcaggcctgtcttcaaatggccatctcatggcatctgagtcgccgccagccagacatggtgagaggggactctcgggagagggaaatgacagttggaaaggaaacatcagagtgaggggctgggctctaggtgcgtttgtctttagaaactgactgatcctttgttctgtctcaggtgcctctggggcaccacaaagaaaaatatttctcaggccccaagcccaaagctgtgctaaaccaattccgaacagatttggaaaagctggaaaaggagattacagcccggaatgagcaacttgactggccctatgaatatctgaagcccagctgcatagagaacagtgtcaccatctgagccctagagtgactctacctgcaagatttcacatcagctttaggactgacatttctatcttgaatttcatgctttcctaaagtctctgctgctaaggctctatttcctcccccagttaaaccccctacattagtatcccactagcccaggggagcagtaaactttctctgcaaagactagatccttttttacgctttgcagaccgcatagtcactgtctcaactactcagctctcctgctgcagcatgaaggcagccacagacaacatggaaatgagtgtgactatgttccaataaaactttatggacactgagatatgaatgttacatcacaaagtagtcttcttttggtttattcaaccatttaaaatgcaaaaaaaatccacaaacaaatgtgctttgtttgagacatgcacagccaggctacagactggatttggcccttgaaccctgcactagcctgaggccctgaccctacttccaaaacatccaagatcatggagcagggggatttcttagaaaaatcagcttacctcagctaactctccattcccaggaactaaccttcatgcctggtggccaatgtacaaattcctgactcagttctttggcaaattccttccacccatatttctcctattcacccatgtaccccaaaagtccctgaataagaatcatgtttttggggcagaatacaaaccactgccccaaaatggcttctttctccaaacagtcccagatgaaaggcacataattcatgtcttaaggctacttttccagcccctttaatactctgggatctatgtgtttcccacattccaagttatctttcacaagccttttaagaacaacatgcacaaaataaatggacaagaactacaaagttattctagccaatgatagtgtttatttgttaggtcctggggtctcaaggtcaaatgatccctctcaattattctgaggtcactgtcctcactagagtgggtacaacttgctcactgcaaaactgtgttcttcaaacatccctacttcttttcttttctttttttttttttttttagaagtagtctctatcgcccaggcgggaatgcagtggcgccatctcagctcactgcaaccttcgcctcccgggttcaagggattatcccgcctcaccatcccgagtggctgggatcacaagctcatgccaccacatccagctaatttttgtaatttttagtagagacagggtttcgccatgttgacctggctggtctcgaactcccgacctcaggtgatccgcccgcctcgacattcctatttctaaataattattacagatctgtcactcaccagttaaacatacaaacggcttttttggaggggatgacctatttatatttttaaatcttatatcctaccttattcaaaagtcctatcagttttcctagtttagagaagcaaagtgacatttttgtgtacatttaacaggactgcttaccttcacaacctgctcagtcggctttccctggacttctcctaaccgcccatttttcctggatttggcaccgagagttacagtatttcacgtgcgatgataaaatgttacttaggagaaacagttccaataccaagaaacttcagcaattttaaagcattttaaagccacaaaaccatgcccgatccccaaaagggggtcctaactcctttacactgtcagaatctcaattttaaaagggaggagtagagaagagatagaaacgctctctgttggtgaaaatctgtcttacttaccatttccccaacacaggagagactaaggaatttcaggtaaaaatcagatggctccaatcctccgatactaagagcccatcgccccagttcccaggagttccgccagttagactttttcccccatggcctcgctaaggctagttcctcgtcacgtgacgtgacaggcttggtcacgtgacataccagctccttccattcccgtgtgcggggggagggggaccaacaaaccggaggccctcgctcttccaatactcacgccctagctacagaggtcaaggaaggtttccccaggagcagttttggtttcagacggcgccgtctcccgcgaaagtcctgagaggagcccagccttttccgcctgccgcccccggatgggatggttgaggccggggccacgccccctctgcccccctgcgagggcatcctgggctttctcccaccgctttccgagcccgcttgcacctcggcgatccccgactcccttctttatggcgtcgctcctgtgctgtgggccgaagctggccgcctgcggcatcgtcctcagcgcctggggagtgatcatgttggtgaggggactccccggcaaggatcggagagggcctgaggggctccgggctgggagggctgggaggcgaggaaactctgggccgcaggcaggccggaggggccggggatctacaggccccggagaaggagacagactgaaattgaaaaatgggaactgttcgagaccagcctgaccaacatggtgaaaccccgtctccaataaaaatacaaaaattagccgggcgtggtggcgcccgcctgtaatcccagctactcaggaggctgaggcaggagaatcgcttgaatccgggaggcggagggtgcagtgagccgagatcgcgccactgcactccagcctgggtgacagagcgagactccgtccccaaagaaaaagaaaaaagggaactggagcggagggccctggagtgggaggagccagggctggtaaaggtggagacccctcaaggtaggagaaacaagagcggggtgcctgagaggtgcttgagttgaatggaggacatgggaggaaaagagagtgcttgttccagaaatgtgtagctgggccttgttttcccagtaatccacccaccgccacttcaagaagaaatgatatgaagaagtgccggttctccctcccctcttccgcactgtcccgtgatgatgacgcctccagagaggacgataatctgggttcctgggagagatggcttggtcactattcccacccttgcctcgaccacttgtctcaatgtcaccacctcacgccctgttccaggtggctgagtccgaatccagtaaccaccacctcgttttggttaatctcaggctcgggtgttgtagcaacattggaaatgggaggggtttacgaagtgaacatgaggtcaggtgcctgaattcaacagtctacccattccccttttccagataatgctcggaatatttttcaatgtccattccgctgtgttgattgaggacgttcccttcacggagaaagattttgagtaagtattcgggtgggggaggcgggctgggagcaggtgggaggtggcgaggcctagggtcagaattacgtctgggaggcccggtgcttagggcccctaggttagaggacttggagaggagagcggctttcttgagaatgtggttaggagccagggagtcagacctcagcggccatcccaaacccaccaccttaggtgtgacctctttaggtattttacttttctgtgcttctcagtccacctctgcaaaatggctatgacagatctcaccccataggatggtcaagaagattgaataaagtaatacacgtaacagcgcctaaacaggtgtcgggcacatagtgctcagaaaatgttggctcctattaaagtttgacccctttgcttcattcccacccccaggaatggcccccagaacatatacaacctttacgagcaagtcagctacaactgtttcatcgctgcaggcctttacctcctcctcggaggcttctctttctgccaagttcggctcaataagcgcaaggaatacatggtgcgctagggccccggcgcgtttccccgctccagcccctcctctatttaaagactccctgcaccgtgtcacccaggtcgcgtcccacccttgccggcgccctctgcgggactgggtttcccgggcgagagactgaatcccttctcccatctctggcatccggcccccgtggagagggctgaggctggggggctgttccgtttctccacccttcgctgtgtcccgtatctcaataaagagaatctgctctcttcagccctgtgtctgtgcttgagtgggggcgagcacggggctgagactagaggtcggcctctgcctggaaagtcccgatgtctgagcggaagtggagcgaagtgtggcgcggaagtgaggcgaaggctttccccatcgactgggcgcgccgagcggtctaagcgactgcgtctgatggggcggggagccgccgggttgagcctatccgctgcggggagggcgggacttcctgcgcgggggcccgagccgctcagtctccctgctctccgtggtcccggctcgcgtgtagcggcggcggcggcgtctccgtgaggaggcgcgcggggccatgacgtcagcgtccacaaaggttcgacctccctcgcggacagcgctccctggcggccacgggagggcgggccccccacttggctcgcggctcttccgccccgggcggggggcgggcgggagccgagcctggggtggggctaggggctccgggcgggacggggagggcgggcgccggccccccgtgacgctgccccgcccccaggtcggagagatcttctcggcggccggcgccgccttcacgaagctcggggagctgacgatgcagctgcatcccgtggccgactcttctcctgcggggtacgtgagcccggactgggacgtggacgctgagagcgggcgcttggactcggtcacagacacggaccctctctagcacagggacagacattagtttccctttgtgcgtggcacagcacagagtcggtgttaataaatgatcgttgggtgagggaatgaatgacagataaaaatacagacaggcccatagcccagactcctgtttcacagttctccctgctgcgaacgggtcgaccacaaaccaccgccactcccaaccaccccagttcatggaattcccccagacggctgcaggctgtgttggtgggtctgttttgaaaagcccttcctggcgagttggtttcagtgtgctgtgtacagcagccgtttaacgttgatggtggaaaggggtgtctaaggtggaggtggttgtgatttcttgtgattggggtcctcccggttcccgcagggcctcaagagctttccgcctccccttacggaggacctctttatgcatccgtggaaggggtcccagaaatcggaaggaggcggctggttggctgtgggatgcatagcctgtgggcgggctccacaccccccctcccatttttgctatcccccctctccccttctgacagtgcgaagtggacggagacggaaatagagatgctgagggctgctgtgaagcgatttggggacgatcttaatcacatcagctgtgtcatcaaggaacggacagtgtgagggagggtggctgccagaaaagggcgggtgggcagccttcttcctccttacccaaggttccatcgtcctcagaactcctttccagctcagctgcttccctactttgtcactagttttttagaatccccttgaggactgaaagaatagaattgtcacagttggtcagaagttcctaaaatgctgtggtaatccttccaagaatgtgaatttaggttgcctgagatgctgttattgtatttgatgatggaagtcccctggttatttatataaatgtttgaggaccccactgcagtgtttccagggatatggtgaccctgaactagttgatcagtaaatctcaatccacctgtaaatcaccaagctctacctgatgtctctcccagaagagaattaggagatgggcctttcccactactcagttcagggactccactctccacactccatccatcctgagtgagtgtaaaacttcgagaaagtgagaaccctaccaatgggttggggccccgacctggattcttatgaagggactcccagaaccccttcccctcccgtcccctcttctgttagtctctctgatgactcctttcctaacctcttctctcttttcttcagggcccagataaaggccactgtgaaacgcaaggtatatgaagattctggcatcccccttccagctgagtcacccaagaaagggcccaagaaggtggcatctggtgtcttgtcacctcctccagctgcccctcctcccagcagctccagtgtccctgaggccgggggtccccccataaagaaacagaaggctggtgagggctgtggagttgctgcctaggggttaaaggtcccatctgaggtttagtgagagaattgggcctgggtcaaagaagggtcagtctctcttcctgtccctgtggaggttcccagagaggggcagaggggaggggagaggaggcacaaagctttgggaagcttggggctgggggagaggctgtcaggggaacctagaacctagcttatgcccccttcccagatgtgacactcagtgctctgaacgactccgatgccaacagtgacgtggtggatattgaagggctaggagaaactcctccagctaagaaactcaacttcgaccagggtaggagtcctcctcctcccacacagctgacggggttggggagaaagggctcacctggatggcagggcacggtctccgcaggggcccctcccttgtataggggtttcagaagagaaggtgctctcatacacagcgcagggcattggatcagtacgtagcagggtgtttcagggaggtgggagtggccttggaagcacactgggggctcgctccatctcggcccattttacttcctgttccagacagcctgaccctggattctggccttctcatgacctctgctgatcctcctctcctctcctgctgagccttccacctctgacctctcactgttcatgccggacctgtggatctcctgggactccgagcaaggcctgcacgagagagggctgaaaggctgctggggctgccacctcgctattcccgcataagcatctgcccccaacccctttgaccttcatctgatggacatttttatacagaaaacaataaagatttccctctcagcttcgtgctgtctgcttaacattattagcaggagaggcctgttccctcttctctcctcggcccatgggggctcagcccctcctcggtagttttcaccaccctgcctggagcagcacagccaatattggcagactcgcttccctgtgccaatatttctgtgctgctagagccagggaagctgggtgtgggcaacaaagactccactttgttctcttgaggcagaacttactcccagggtctctggccatcagtattcttgaaactgccctggagattttagaggggtgcttacataccccaccctctccttgcccacctggcaagaagtttgtcacaaggccccagatgttttttgtgtcacttctccaggatggcctcccagggccaagcctcggcggtgcctcccccaccctcgctctaacaccacagtgtggtttggacgtggccacagtgccgtacaaaccacagtgtgctgctggggcgggagcaggaccggggtgggttgaaaggaagagagcacatagcagtgctgggaagaccccagcaccacctccaggagcggggggatagagaagccttaaaaggcaaacatggcccccaaaaacgtttgggaggaaccagggacgggctgagcaggcaactggaaggcgacggaccatggggatgagctcacagtgtagtaagattggaccatcttccctctgtaggaactcagctcaggggatccctagggtggggtcagaggcagaagaaatagggaatgactggaggggccaacacactgcctcctgtctcagcaagggcagggacccaaggcttcctgtgtccgtccttcctctccctgggtcagaacccaagagaaaagcaaggagagacagagggccaaggccagcagggttgggagttggcagtccagaggtggtggggccggaacatggttgggagaggggggccggaagtcgccctgggccctgggcctgccacaagatggaggccaaaggcaggaaatggagaccagggggaaggggagcagcagagcccaggaagagggccatctggacctggggggccaggtattcaacccccagtgctgttcccactccccagggcccctgaggacccgagccggcccccacagcaacctccatcagcccatccaccaggccagggcaggcgggcccaccccagagagccacgtttaagctgagacaaacatgcctctccccacccccaactccaggccttccctcagcccttttctcctgtccaggacttgattttttaaaaacacccctcagaaagcaaaatccaagggccaaaactccttttgcaaatcaaaatatgaccccctaaaatccagaagttatcttcctatatcccatcgcatcttttaccaccccctcttccgacacaccccccaaaactcttagcaatctgaaagatccaaggtggtgtatgtaagcagtctttttaggcccccgaagatgccagacccctcccggacacccctatctgccctccatcaaatcttgccaaggcctcctgctcctccaccaccctccatagcccccaaactaacagttgcccccagctcctacctcggcagagcctttgtggggggtgaaagagaaattaaacactatcctaacggctggggatgttggggggctctctggtctcagcctttggtttccgtctggggggctgcagtttaggggtataagagaaagcctctccaatcatccccccaattccaagactgacaaagccaaccccaccccagcacgcacctccaaacctcccccccaaccgccacgtctctcctgaaaacagaggacacttccctccccacttacctcagctactctcccctgagatcctggtcccctattttgaaaagagcaaaatttagggtgcatccctcacatttggggtgcaggagaaaggagccgccccagtcgcatcgctggcctccttcctctcggctggctcagggactggggagtgccctggggagggggcacccccacaagagatctcaggaggggttcctccactcccagtcagaattggggacacccccccaaaacccgtcccagcccatccgtctccaactcggcgggagaggcagctgcaatgccccagtcagattcacccaacactacattcctcaccccatctagaggggtcccggggtccccaaaaaatcccaaaaaaatctaggatgttgggaggacggtcctggactagctccccaaatttggggtcctcagatacccccgttttttcaggaaaattccgtcttttgcctgcctcccgccagccctgctctgtcccgatgccaattttggaagtcactccctccttcctcctccccgtctctccaggccccccccaccgctcgggggctagggtccaggacacctggcttccagaccggggggaatcactcctcaaagggctaggggccaggaggtcaagctcattgcccctgtcttaaggaagcaggaaagcccgttcctcccttcccctcccccctggctggtcaccgtggtggtttaggaaagcctggaggattggaatctgccattgctgttgcacaggcagttttttttcttgggttgggggggtgggcggtgggagggagagaggggaggagggccgaagagagaagggacccaggcgcgaagagctggcctggcttaccctgtagccccggctgccgtggggaacccctccccgccatctcacccacactcccagtcctctgtctgctttctgtttggggctcatcctagaaaatcagggtgcaagaatcacctccttgtaccccaccagcacccctccttgccacagttccaacagcactgccctggtcaggggtgcccacttggccaagggacaccccatttttctccaacttcccccaaactaaggggtgctcccttaagaaattgggattcagagtctgaaaccgccttttctccctctcttctccctcaagccacataataataaaaggagataccacaccctttccaagtttctcccttcaaatcctgggcttatttgggggttcactaaagaaacttctagaatctggggtgagagggcactataagcaaaagacatcccaaaccagggtccaaattaagtgaactcccaaatcagtctcaccttatgattatcccttagcttcaccaaaagcagccagagtgacaaaacacccccaaaataagaacaccccagaactttagtctcctgtcctcgcggccctcaccttgtttctcccctggggaaaaagcttcttgggtatccatggatacacaggaataccccacgtctttccactttgtggaacgtgagtgtccacaagactcaaatataaaagtttgctcccccctcccaggacccccaatcacagaaagcttcgaacttgctcccagcttcctataatgttccacctcaaactaatttttaaaactccaaattgaacttattccccaaatctaatctgagccttgaaacttagatggcaccccaaaatagactgcacccccaaatcagcatgagtactttggttctgctgatagtccaagatgacacaggtgagcacaatctccaaattgtgggtgtcagaacccccagaactaatgtaacttccaagtcagccccatacctgaaacttaccatataggcctcaaaggctgaatgcagccaccggtgctcacaatcaaatcaacaccccataataaacagacaccccacaactgatcaaataatactccatcctgatgccaaagggagagcccctagtctaattctcatctccaagctgggcagagacctaaataaccctcacatgtcaaagccacctcatcgtcctgaatttcccagttcccggtttctcagctgttctttcatgcattcaaataaagacacactccggtctgaaggggagggccccgggcctgatatccagccccgtggaccatggtcggccattcctggccaactgtacactctccccagcccaaatccggggagcttctgccttgcagctggattcagctctagcaccccttctccaaatgagctttgccttgcctgcccgcaatgtctcccgaaacaaaatatgagggtgtgatccatgcccatctctcagatcagggacttcaaattagggtggttaagccccctcctgccctctctccctcctccttgttttcccttctcgtttaccccacccaattttaatgttcaattaaaagtcacctccaaagacatctgggtagcagtgtctagcttaattcgaaaagaaaacccggagttcccaggctcaggtcccgcttcttgtcccacccattcccctggctcctaaagcccgcgatttctcacctcgggtaggaaccccagcctgaggggaaagtcccctcggtctcctaactctagctccctccgcccagccctagtcccctcctaggagacagaggtgcaaaataaacccgcgcaaaggggaggaggctaaaggtttcagccgcccagaccaaatggatcctgcgcccgggtctgagcgcaccccaggccgggtggagacgaggggcgaggcgaggccagtgctcggccgccccctcgtggaaggagccgcacattgccgagccttgcctacttgccgcgctggaccccggcgtcccgccagcctccaagcgtagccgacgggcgggtgcccgaggccctcgtgagctgggattgggggaaagcaagcgggctttgggcgggagtccatctctctggatccctacaaggacccagaagagagtcgggagcgagagaggccggacgcctaggtctcccgagcgtctctcgcccctccacccccacctcggggctttccccacctcctcgaggggaagcagctggcggagccgtccggtcgcaggacaatggaaggaaaccaactagaaatcatatccgccctctccgtaccccgcccggccagagcccccctttttgtaggcccgggtagagtagcctgtcattcacaccacaccctccccgtctgagaccctacgggagcccactgtcgtctgcccaaacctgctgtctcgttgggctcccccttttctcccttaacacagtacaagagagggagagggggttgccgtatgcactttgtcctgcagcaaaggttggctcctggcaaaccctcccaaaagccaacacaccaattttcactggcccaggccttccgacgactcagactcccgtattgccaacctcgatatccctaacctcctccccaattccaatatccccgtcctcgtgtccacttgcagtgacccaagaccccctacgttacgaccaccccttgtttctgaggtcccgccctcgagacggagaccccgccctggactcgccatctggagagcgagggaggaaggaaggatacagacccaggcgttcaccccacctccacccccgcccccgacatcccggccagataaaggagccgaggccaagaggggagagagaccccgccccccttaagaagagaagccgcggcccctgcaggacgggggtaagaacaagagactgagggagccagactcctgggtcccccaagagggtaggagcttgtgtggagcttgccatcagcgagcctgagtcccagaaattgggctaaactagggattggggactagataggagtcgcagaattccgtagttcggggaagggagcctcggctgggatttggaggtgtgtggacggcaggccgtgagatctcgaggcagggttggacacctgagacacaggcgcgcagaggggagtggcggtgctggaggggcactgggggtcgaacccagggcgatgggcgcgggattccccacgctcgccaacgacgccgcggtgtggaaccttcaactggctccaagcgctgtgggatctggaagaggcaagggagcgagggtgtcgtagagggcagaatgaacaagaagaattaggagggaggctgcgtgtgccggggctaggggctggaagtcctggctctagttgcacctcggaaggaaaaggcaaacagaggagggaaggcgtcttaggactgcctggatccagagcactttccacggcctctacaggcctgtgtcgctatgggttcccccgccgccccggagggagcgctgggctacgtccgcgagttcactcgccactcctccgacgtgctgggcaacctcaacgagctgcgcctgcgcgggatcctcactgacgtcacgctgctggttggcgggcaacccctcagagcacacaaggcagttctcatcgcctgcaggttcgaggggtggggcctggggcggggccaaatgggaaaggggtgggaccacagggccgttgagagggaatccgaagccaagtctttcagaagcaggaggcggagcgtcccagaattgggggcggggtgatagtgaggaggcgggactttttcagggggcggggcttcctgaagctgcgcatgtctcccttggttccccagcccccaaaggacttatctgctctctctctagtggcttcttctattcaattttccggggccgtgcgggagtcggggtggacgtgctctctctgcccgggggtcccgaagcgagaggcttcgcccctctattggacttcatgtacacttcgcgcctgcgcctctctccagccactgcaccagcagtcctagcggccgccacctatttgcagatggagcacgtggtccaggcatgccaccgcttcatccaggccaggtgagggaccctggctcggcgttctctgtgggtgaggtgttaagggcaaaggcagagtttaggaaatggcactaacgttcatcacactttccccagctatgaacctctgggcatctccctgcgccccctggaagcagaacccccaacacccccaacggcccctccaccaggtagtcccaggcgctccgaaggacacccagacccacctactgaatctcgaagctgcagtcaaggcccccccagtccagccagccctgaccccaaggcctgcaactggaaaaagtacaagtacatcgtgctaaactctcaggcctcccaagcagggagcctggtcggggagagaagttctggtcaaccttgcccccaagccaggctccccagtggagacgaggcctccagcagcagcagcagcagcagcagcagcagtgaagaaggacccattcctggtccccagagcaggtacagagtctagaacctcaagaatttgtcagagctggcctcagctagaagacagagtcattgggccttgatggtcaggaggaagggagataggtggtgggtttcagagacactagctcaccttaaggagctggccagagaccaggtttattcagcagggtggcacttgggcagtacaatggatgtggctcattggtcaacaatattggctcaccctgagagggcaggcctttggctccaaatttcccaggagagaacccccacccctcaaccgtacaatctcttttaaccctttccttgccatctgcctaggctctctccaactgctgccactgtgcagttcaaatgtggggctccagccagtaccccctacctcctcacatcccaggctcaagacacctctggatcaccctctgaacgggctcgtccactaccgggtaagagcccctctttcttggcttttctcccgtgactgctccaggcaagtttgtgccaaaaactctcccagaaaggcctattccaatggttcctaaactttattacaaattagaatcacctaggaagcttttaaactcccactgcccaggtcacactccatagattaaaatatctggacatgggacgagtcatcagtatttttctaaagctctcccagtgcttccaatgagcagcaaagtttgagaatttctggcctatcccctttcagagctgaatggtcagcccaaagcttgtcagggcctctctggcaggctgtcattcagagtggtgcaagtgaggaggagattttagccaagcatggtggctcatgcctgtaatgccagcactttgggaggccagtgcaggaggatcacttgaatccaagagctcaaggccagcctgggcaacatagtcagatgtggtctctacaaaaaataaaaatgaaaattagccgggcacggtggtgcacacctgtagtcccagctactcaggaagctaaagtggaaggatcgtctgaacccgggaggtggagattgcagtgagccgagatcacaccactgcactccagcataggcaacacagcaagactctgtctcaaaaaaaaaaaaaaaaaaaaaaacaggaggagaaacaaaactcctcccactagcaggggcctccacctaccaccactgcttttattttatttatttatttttttgagacggagtctcactctgtggccaggctgaagtgcagtgccgcaatctcggttcactacaacctccacatcccaggttcaagcgattctcctgcctcagcttcccgagtagctgggactacaggcacgtgccaccacacccagctactttttgtatttttagtagagacgaggtttcaccatgttggccaggatggtctccatctcttgaccttgtgatccgaccgcctcggcctcccaaagtgctgggattacagtcgtgagccaccgtacctggcccccaccactgctattgaagaggagattagctgagtactcgagtcagacagatgtgcagtcagatctggctcatcttactatcttcttacttggccttgagcaagtcaaaccagccccagaagtcttaacaataaattgggaaacagaaagcctgctactgtgtggtttgaggattcagtagtacctagatagccctcattaataactatggttgccgtcacccattccccttcccaggaagtgaatttttcagctgccagaactgtgaggctgtggcagggtgctcatcggggctggactccttggttcctggggacgaagacaaaccctataagtgtcagctgtgccggtcttcgttccgctacaagggcaaccttgccagtcatcgtacagtgcacacaggtaggggaagagagggccctggccttcaagcccacagctgtcctagggcaaagtccctgatctcccatgttctctgcctccaggggaaaagccttaccactgctcaatctgcggagcccgttttaaccggccagcaaacctgaaaacgcacagccgcatccattcgggagagaagccgtataagtgtgagacgtgcggctcgcgctttgtacaggtacggagccagcctccaagtggcttccaaggcaaacctgcaagaggtggggtgggccaatagggagggttctgttcctcccagaggcaggacttgaagtctcctccctcccaggtggcacatctgcgggcgcacgtgctgatccacaccggggagaagccctacccttgccctacctgcggaacccgcttccgccacctgcagaccctcaagagccacgttcgcatccacaccggagagaagccttaccacgtgggtacccaacctggcctgcccactgccttagaattacctctcctttgcctaggggtgggctctgagaggtgcgggcctggctgtccctagatctcttagaaatgagcggtggccggaagagtccaagcaaataaggggtggaggctgggagtcaggatgggcaggtatagaagtgatgctcctgggctgagcactgttttctcagagaggagctgagaagtgggaaaacctttgctaaataaggcggggcctatcccctcagccacccctgaggatttgggaggatgtgagagtcaaagagctgatcttccgctggatagttcccacctgggagagctggacggccgcccggctcaacacctaaaaggtgattgtggatggggcagggcctgacttggctgtcctcccacagtgcgacccctgtggcctgcatttccggcacaagagtcaactgcggctgcatctgcgccagaaacacggagctgctaccaacaccaaagtgcactaccacattctcggggggccctagctgagcgcaggcccaggccccacttgcttcctgcgggtgggaaagctgcaggcccaggccttgcttccctatcaggcttgggcataggggtgtgccaggccactttggtatcagaaattgccaccctcttaatttctcactggggagagcaggggtggcagatcctggctagatctgcctctgttttgctggtcaaaacctcttccccacaagccagattgtttctgaggagagagctagctaggggctgggaaaggggagagattggagtcctggtctccctaagggaatagccctccacctgtggcccccattgcattcagtttatctgtaaatataatttattgaggcctttgggtggcaccggggccttcattcgattgcatttcccactcccctcttccacaagtgtgattaaaagtgaccagaaacacagaaggtgagatcacagctctgctggcagagattactagcccttggctctctcgtttggcttgggtattttatattatttctgtcataacttttatctttagaattgttctttctcctgtttgtttgcttgttagtttgtttaaaatggaaaaaggggttctctgtgttctgcccctgtaattctaggtctggaacctttatttgttctagggcagctctgggaacatgcgggattgtggaattgggtcaggaaccctctctggtattctggatgttgtaggttctctagcagtctagaaatggatacagacatttctctgttcttcaagggtgataggaaccattatgttgagcccaaaatggaagtaataataaatgcctcctggaggctgtgggtgtgggggattctgtatctggattccgtatcactccaagtggaggctggcaggtttttctgcaagatggtccagaatctaaaatgtcccattaatctggtcacttgggtttggctctgctgtatccatctatagtggtagagacccaccagggctcaagtggagtccatcatcctcccacgggggcctgttcttagcactgagttgatcgctccatgggggagagatcagacattccttatcagagatgatgtgaccttttctgactctgcccagtctctatgaatgttatggcctagggaagaatcatgaaactctttagcttgattagatggtaaacagtgttaacccatcctttactacagaggcatatgggtttgaatgttacctggggttctctctattgagttgagccccttcttcctttagtgggttttggacatcttctggcaagtgtccagatgccagaaccttcttttcctctagaagggatggtgcttggtaaccttaccttttaaaagctgggtctgtgacctggtcttcccatccctgcattcctgtctggaaccagtgaatgcattagaaccttccataggaaaagaaaaggggctgagttccattctgggtttgctgtagtttggttgggattattgttggcattacagatgtaaaagattgactagcccataggccaaaggcctgttctagttgaccaagtttcaagtaggattaagaggttggttgaggggtgcagtttctggtgtaggccaggtaggtagaaagtgaggaacagggttgcctcttggctgggtggagtctctgaaatgttagaagaagcgctgaagccttgattgatagttctgccccttgttgccctggggcttatctgattatgggacgagggtagaaagtaagaagcacttttgaatttgtggggtagaacttcaacaataagtcagttctagtggctgtcgcctggggactagtgagaaagctactcttctccctcttccctctttctccccatggccccactgcagaattaaagaaggaagaagggaaggcggaggagtctataagaaggaatcatgatttctatttagcagattggatgggcaggtggagaatgcctgggggtagaaatgttagatcttgcaacatcagatccttggaataaagaagcctctctgtgctgcctgctgtgtcctgggttcttgccttgggggactcggggagcgaggaagagagctcttcctcctggataacatcttggattctgtaccattccactgtcccttcccaccagacattttaaatggtcctcgttgtccccttccctgcccttgccttcctgctcattgtgtaggaaccagtgacttcatgaagtttctccggagccacctgcatcctgctgctctgaagtcacttcctgcctgaggtgtggaggctgcagggagaaaccaggaagccactaataatatcaagaggccggggcgtgcatctgtgctggagatcttaatgctggcgacatgcctccatcaccaaggaagatggataagagttgggtcccgtaaagaccacaggggctggaggtggcactgagaagactgagttagaactaacgggccagcccaccctcccccagcaagggtatcttgaatctatccagggtccagtgcatgcatctctcccaccctttcccctgtcctgtgtgtgtgctgggtgcggaggtcactaattctgatattaccttcctctgggccttaaattcctcatctgtgaaaaagtcagttaccatgatctctgcagctacctccaacattgaaagtttgtagttgtcttaatctgtcttctgttgcttattatagaatactgaatctgggcaacttataaagaaaaggaaattatttcttacagttacggacactgaaaattttgcccaaggtcaagtggccacatctggtggtggtcgtctggttggtgggggctctctgcagcacaggaaacattgccagtgtgcaaacattgccagttcaggtctctcttcctcttcttataaagccaccagttcccctcccgtgataacccataatccatgaatggcagaaccctcgggatccaatccaatcatctttttttttttctgagacagaatctcgctctgtctcccaggctggagcgcagtggtgcaatctcagctcactgcaagctccgcctcccgggttcacaccattctcctacctcagcctcccaagtagctgggactacaggcacccgccaccacacctggctaattttgtatttttagtagagacacggggtttcaccgtgttagccaggatggtctcaatctcttgacctcgtgatccgcccactttggcctcccaaagtgctgggattacaggtatgagccaccatgcccagcccccaatcatctcttaaaagccccagctctcaataccgtcatgttgagaactaaaagtttccatatgaatttttagaggagacatgcaaaccatagcattctgtccctgggcccccaaaactcatgtgcttctcacatacaaatacattcattccactcccataatcccaaagtcttcactcattgcagcatcaaagtctcatctgtgagctagttatctacttccaagttatggagcaagttatctacttccaagatataatggtgggaacgagcatagtgtacacattcccattccaaaagggagaaataggcaaaaagaaacgggtgaaacaggccccaggaaagtctgaaacccagtgaaacccagcagggccaacatgacacctttttttttttttttttgaaaggaatctagctctgtcactcaggctggagtgcagtggcgcgatctcgctcactgcaacctccgcctcccaggttcaagcgattctcctgcctcagcctcccaagcatctgggattacaggtgcccaccaacacacccagctaatttttgtatttttagtagagatggggtttcactgtgttggccaggctcgtcttgaactcctgacctcgtgatctgcccgcctcgacctcccaaagtgctgggattacaagcgtaagccaccgcacccggccaacattgcgacttaaaggtagagaataatcttttttgactacatgtggcacctcctggacacagggtgggagttggatccccaaggcttcaggcaacccagccctgtggctttggtgggtgggctggagtctggtgcctgaagtttcctggggggaggggggcgctgcctgctgcctgtgattccaaagttctgggggcctggtggtggtcctgcttccacggctgtactaggcattgccctactggggactgtgtgcattggccttgttcctatggctccaccaaggactaccccagtgggggctctgcagtggccttgcttccacaattccaataggcattgtcctggcaggcactctctgaggcaacttcaacatcacattgctgctgggtattgctctggtgggggctctctgcagtggctctgcccctgtgacaagtccctgcctgggcccctaggctttcaacaacatcctttgaaatccatgtggagactgccaagccttcacagctcttactttctgcaagactgcagaattagcaccacaaggatgcagcaaaggtctatgatttgcaccttctggagcttcaatacaagcaacacacacacacacacacacacacacacacacacacacacaaggaacacctggggccacttaagccaccaccaggctggggtggccacagagtgctacactggggtgtggggtgcagagtcctgaggttgccctgggcggtgagcccatggagagcacccagggcctgtaccctgaaaccctctgtcctccaaggcctctgggcctgtgatgggaggggcagcctcaaagacctctgaaatgagttcagggactttcttccattttcttgaggaagagcacctggctcctttttagccatgttaatctttttagcaagaagtggcttggccacgcccttggattcatctcctgaaaatgctctttcattctctaccacatggccaggctgagaattttccaaatgtttccactctgtttcttttctctgtgagatcatcttaagcagttagaagcaaccacacagcagcctcagcattttgctgcttagaaatgtcttctgcctgccagataccctagttcatcactctcaacttcagccttccacaaagcccttgggcatggatacagtttagccaagctctttgccagttcgtaacaaggatggcctttactccagttttcaataccttgctcctcagttccatctgaaagctcatcagaatggcttttgcttccatatttcttttttttttttttttttttgagatggagtctcgctctttcgcccaggctggagtgcagtggcacgatctcggctcactgcaacctccgactccctggttcaagcgattctcctgcctcaccctcccgagtagctgggattacaggcgagtgctaccatgcccagctaatttttgtatttttagtagagacaggtttcaccatgttggccaggatggtctcaatctcctgacctcatgatccgcccacctcagctttccaaagtgctgggattacaggcgtgagccaccccgcccagctgcttccatatttctatcaacattctagtcataaacacttaaccaatctctaaagaattccaaacttttcttagtcttcttgtcttctaagacctctccagaatctaggctttttctagcctactcctccaaatgcttccagcctctgcccatcacccacttccaaagccacttcatcattttccgttattcattatcagcaacaccccacttcttggtaccagttttctgtctcattcagttcattttctgttgcttacaacagattatctgaaactgggtaatttataaagaaaatgaatttatttcttatagtatggaggctgagaaatccaaggtccaggggcctcaccctctagtgagggttttcttgctgatatggactctctgtggcacagggtgtcacatggcaaagggggctaagcatgctaatgttctagcttggatctgtctgaaaaagccgacaattcccctcccatgataacccattaatctattaaccttttagtcctttatgatggggttaatctgttaacctattaatccattatggtgggctaattcatggggattaattaatccattaatcccatccaatcaccttttaaagtttccacctctcagtaccgccaagttggggattaagtttcaatatgagtttttggaggtaacattcaaaccatcgcagtggtcgtttctcaatctttttaaacccatgacctggattagattttttttttttttaatcaaaaaacaaaaactaggcagggcatggtggctcacgcctataatcccagcactttgggaggcccaggcaggcagatcacctgaggtcaggagttcgagaccagcctgaccaaaatggtgaaaccctgtctctactaaaaatacaaaaaatttagccaggcatagtggcaaacacctgtagtcccacctattcgggagactgaggcaggagaatcacttgaacccaggaggtggaggtcgcagtgagccgagatcatgccattgcactccagcctgggagacaagagcaaaactccatctcaaaacaaaaaacaaaaaacaaaaaaaaaaacactaaactaaaaccttccttcacttcccactacagcagcttatcccctgttgaaaataacaccaataagaccagctaagctaatattacttggctcctgctgcatgtcagcacataaactaagcatttttagtgcatggattttctaactgaaccccttgggcaacgcttaatagtaggtactattatccccagtttacagatggggaaaccaactgagagattcagcatcttgatcgagttaagtaataaagtcaagattggaactgggccaggcacggtggctcacgcctgtaatcccagaactttgggaggccaaggctggtggatcacttgaggtcaggagttcgagaccagcgtggccaacatggtgagacctcgtctctactaaaaataccaaaattaactgggcgttgtggtgggagcctgtaatcccagaaactcaggagactgaggcaggagaatcacttgaacccgggaggtggaggttgcagtgagccaagatcatgccactgcactccagcctgggccacagagcaagactccatctcaaaataaataaataaataaataaataaataaataaataaataaataaaagactggaactgtgatctgattctaaagacccgagttcttaatcactatgtaatacagccacagcaatttctgtatctttggcatattccccaccagccgacattttgactcttagaaagtatatatgtgtattattgatgattacttttatttcccacatataaaattatttaaggctcaatatgtcttttaagactacacacctccctccctgcctccacttcttgtttgctgctttccccagtaatctgggagtgaacattgagtccacggtttcaaggtcagggtcctgggaagtatggcttataatgaaggaacaggaaatccaagccattggtgttatggagactgggaaggactggggagtgtttgctaggggcctgaggactacttgggtaagagggggctgactgctccagtggccagggtcatagtttgtctctttagtctaccccaccatcagatcaaaaaaggtggttaggaagtggttgttactagagggcagaggaaaaggttccagccccagtgaggaagaggtaggtggtgttggtggggccctgtgtgagcttacagccgcccttcctctcctcagttatttttggtctctgtgacctgtaggtttcctgttagtgggaacagaagtgacaggaacgagttcccactacagaaatgaacgccaggagtccaactcattccccttctctcttcccttagccgttgaacttctcagggatccaggcttctaggtctgcgtgcctagggctgcgtgttagtggcttcaggcgctgcgccaaacacttcgtttgagtctcatctcctaacccctcccctacccccaacagggccttgcaattcctggacccctcattaaagcaagagagtcctctcctctccagacccagtttacccaccactaacccttccgtgtggctctgggtgctgaaacggggatgacttggcccgctaggtgaagaggagacggaagcttcctggcagtccccgcgtcacgtggggccctacctagtcagcctcctaacgcccctccttacgcatgcgcccattcactgctggtccccaacaatgcctaaatcccgccctgcccttctcgttccgcccctgcccgggagccccgcgtcctcattggcgagctccagggtggcccggcccggacaccccagtgataaaatagatcatctacacggaaactggcgcgctccaggggtggggcccaaactcagttccaccctctggctcccagccgaacaccgaaccgggaccgatccggccccggcttgaactagctcagctccgagctcgcggaaccacgcccccgggagactctggcccggccagcgcgggccaggtcttcagtcctatatcgccccgccttgggaaaaggtgcaggggcctctcgccgcctcgtcgggcccttcctctctacctgcctctccaacccctctcggccccgagccacccggcagcgggggtgggtgtgcagaggtgcggcgtccagaacccggctcctgcagaggctctgggtggcagcagccctgttaccgcttagatggcgcgcaggacagagccccccgacgggggctggggatgggtggtggtgctctcagcgttcttccagtcggcgcttgtgtttggggtgctccgctcctttggggtcttcttcgtggagtttgtggcggcgtttgaggagcaggcagcgcgcgtctcctggatcgcctccataggaatcgcggtgcagcagtttgggagtgagtgcggcgcctggatctggcggactgcgaccctcggaagggagagggaatgcggcgactgggaagtggaagggcgaggggcgggagatgctgggggggagacccctgagatcttctcgcagcgccccttccacttcctcaggcccggtaggcagtgccctgagcacgaagttcgggcccaggcccgtggtgatgactggaggcatcttggctgcgctggggatgctgctcgcctcttttgctacttccttgacccacctatacctgagtattgggttgctgtcaggtgagagcctgcacaagggcaggagagtcaaatgcttagatcgttggatgttcacctccttcctgctccttccaaagggttcggggagaagctgagggaaagtttagctagcacctgtacccagaagggaattcttaataggaatgactaaagcgacaaacatggtgaggaattaggaaattcaaggatgatgaaacctggccgggcacggtggctcacgcctgtaatcccagcactttgggaagccgaggcgggtggatcacgaggtcaggagtttgagaccagcctggccaacatggtgaaaccccgtctctacaaaaatacaaaaattagccgggcctggtggcgctaatcccagttactcgggaggctgaggcaggagaatcgcttgaacccgggaggcggaggttgcagtgagccaagatcgcaccactgcactccagcctgggcgacagagcaagattctgtctcaaaaaaaaaaaaaaaaaagatgaaaccaagtatacaagcccagaagcccagggctaatgggactggagtgtaaaaggaagaattactataaaatggtgctaggggccaggcacggtggctcacgcctgtaatcccagcactttgggaggccgaggcgggcggatcacgaggtcaggagatcaagaccatcctggctaacacggtgaaatcacgtctctactaaaaacacaaaaaattagctgggcgtggtggcaggtgactgtagtcccagctactcgggaggctgaggcaggagaatggtgtgaacccgggaagcagagcttgcagtgagccgagattgcaccactgcactccagcctgggcgacagagcgagactccgtctcaaaaaaaaaaaagaaaaaaaaaggtgctaggtactgtgactgtgaaatcgatatcattattggatttacagctggggaaaagctttaaagcttatacaacttggcaaatgaaggtcacacagctagaaatggtagagcccaggtctaactccaaagttctgtgctagttaccttacaaactttgtctctaatcttccacaatcccaaaaagtgtattattacattttgcagttgagaaggttgaggctgggggtgttaagtaaaacacacaaggttacacagctatgaagtatccaagccaagattgtatcccaggtctgtgggactccgaagcaagtgctacattctgctgctgggcaatgcggggattactgtgtgccttgagctccctaagagttctcaacaccacttcttcctttttgacaggctctggctgggctttgaccttcgctccgaccctggcctgcctgtcctgttatttctctcgccgacgatccctggccaccgggctggcactgacaggcgtgggcctctcctccttcacatttgccccctttttccagtggctgctcagccactacgcctggagggggtccctgctgctggtgtctgccctctccctccacctagtggcctgtggtgctctcctccgcccaccctccctggctgaggaccctgctgtgggtggtcccagggcccaactcacctctctcctccatcatggccccttcctccgttacactgttgccctcaccctgatcaacactggctacttcattccctacctccacctggtggcccatctccaggacctggattgggacccactacctgctgccttcctactctcagttgttgctatttctgacctcgtggggcgtgtggtctccggatggctgggagatgcagtcccagggcctgtgacacgactcctgatgctctggaccaccttgactggggtgtcactagccctgttccctgtagctcaggctcccacagccctggtggctctggctgtggcctacggcttcacatcaggggctctggccccactggccttctccgtgctgcctgaactaatagggactagaaggatttactgtggcctgggactgttgcagatgatagagagcatcggggggctgctggggcctcctctctcaggtaagtggaatggggttcccagggggtgagggctgccatgttgcacaactaggggagggtactattctcattacagtgtatgtgaatattgccctctggtgtagtacagtacacagcctgcgtggccaaccatagcatccctgaaatgggtccatggggcaaagaacttggggctgggaaagtctgagtggaaagacaaaaagaagctaagtggaacccttggcagggtgcctacggcttgggtttgcagaggacctggcagaacctggccagacacagacgtagcattccagtgtgcaccctttcctttggcctactgggccccaaaccaggtatctgaggcacctggtcaaagttctgctggctcagggtgccagaactttcagacctttatctcctcttacccattaactgaagctttagaaaggccacagttggtgggcgcctgtagtcccagctactcaggaggctgaggcaggagaatggcatgaacccgggaggcggagcttgcagtgagctgagatcgcgccactgcacttcagcctgggcgacagagcgagactccgtctcaaaaaaaaaaaaaaaagaaaggccacagttgccagaaagaaaggcacaagtatgcctgactcaatctggatctccaaatccctgcaggctggtttggaggtcctttctgaaggcggggaggtggttgaaattaacttttgaggcccttttgggaaaccagagttcttaagtttatccaactattccatgggagttccaactcctctgagatgataagtcttccctccacccaaaaatgtatctgagccctcagccccagcaaatagatcactcatgtgtattctttttctctcttggacctaggctacctccgggatgtgacaggcaactacacggcttcttttgtggtggctggggccttccttctttcagggagtggcattctcctcaccctgccccacttcttctgcttctcaactactacctccgggccccaggaccttgtaacagaagcactagatactaaagttcccctacccaaggaggggctggaagaggactgaactccacagagtcaggcccagaaagccaaagcttgacagctccaggtcttctcttgccacgtcttggtctccacagaaccacagtgccttaagattcttgatctgcctccccctagagcaggcctggggctcctgcaatgtgtgtgccaaccctttgtattttgttgaggactcttatttctccgttactctcctaaccttttcttcttttttctttttcccgagacggagtcttgctctgttgcccaggctggagtgcagtgatgtgatctcggctcactgcaacctccgcttcccgggttcaagcgattctcctgcctcagcctcccaagtagctgggattacaggcgggagccaccacacccggctatttttttttttttttttttgtatttttggtagagacagggtttcaccatgttggccaggatggtctcgaactcctgaccttgtgatccaccccccccccccctcggccttccaaagtgctgggattacaggcgtgagccaccacacccagcctcccctaaccttttctaaaggacccaggagttttgaaggatccgggagttcctgcttcactgagctgtgaatcaactgtgaaaatcaaaggccaagagacttatcatgctttatataacatctctagtgttgcctcctgagtttcttctctgaaggcacatgtttgggaaacaaaactgtccctttgagataaaatcaaataagaaaattggataataatcacaacctcaaaatgagctggggcccatatgcttgggttggccgaatggagtcatgcctggaagtggaggagagtgtccaggagctccgatgacccaaggcattttaaccctggaatctgctctccaggctaccaccacatacctccctcttccccattatccctgtggcttagaaaagaaattgagggctgggcatggtggctcacgtctgtaatcccaacactttgggaggccgaggcgggtggatcacgaggtcgggagtttgagaccagcctggccaagatggtgaaaccccgtctctcctaaaaatacaaaaattagccgggtgtgttggcgtgtgcctgtagttgcagctactgggaaggctgaggcaggagaactgcttgaacccaggaggcggaggttgctgtgagccaagatcgcgccactgcactccagcctgggcaacagagggagactctgtctcaaaaaaaaaaaaaaaaaaaaaaagaaggaaagaaaagaaattgagagaatgctgaggacacagggtatagatgtgtgaatagctttgatagagctgaagtctgggcctaggattcttgtatttccctcaggcccatagaaggagattgaaatgcagggaagagttaagtctgggaggtctgggaactagggtaagggacatgaagatggggcagatagcacccactagcaacccgcccccaaccccagcaacacactgaaactggctgccagacaacttcgcaaagattccctgttacggccaggacttgggcaaagagaaatggattggctggacagtcacccttcttcatacccagggccttctgggatcctgttcctttgaaccagcctttctggctgtcttatgtagaatattttcagggtcctagattggtgaacagttggaggtttcaggaaaacccgataaaaattctttattgggggaggggctcaaacaagaaaataatcaacaagtggtgtccagagtggagccagggcctcctggggacagcaagactgcctggggagcgggaagcagctcccccgtctctgggggaggcgtggctggaggggaggctggaccacaggagggcagcgccctgggcaaccctatgtagatgaagctgccggagaggatcaaagaaccagacaggaggaaagaggcggtgaagtctcctgtctcatcccttaggaagcctgaggagatgggtaagggcatttagaagcctcgaaccccaggggcagaggatagttgtaggcagatctgtgagctcaggtccttacctgacaggggagggcccaggagccccccgaggctcatcagcatcatcaccagccctgtggcctgcaccacacctccgacgcccaccagcccggggagtacaccgaaaaccagcggggcgtaactccccgcgctcagcccataggccacagccgcggccagcaggggacccccccagctctcttcgccgcccaccacgggcaccagccccaccacccacagccccagcccagtcagagccccgaatacggccagcagccgcgggaggggcacccagccttggtctgccagccacccgcagaccagccgggcgcccgcatcccccatcgcagccacggccaccaccagcgctgctccgtatccccccaggccccggtctaaagcgtggggagccaagtgcacgtaaggaacgaagtacccgcccccaaccagggctgtgcctagagcaaagattgagaaggcccggcgtgtgaacagactcaggccgagggcagctaggggactacgcggtggggctggggggtctccaggaaggaccaggggtagcagcagggcgccacagggggtgaggtggagggtgatcgcgccgaggaggagcagagcgccccgccagccgaaagtatcgagaagaagctgcaaggcgggcgccaggagcagcgaggaggccccgttgccggtgagcgccagccccaccgccaagactcgacggcgggagaagtaacgcgagagggtgcctagggcgggggcgaacaccagggcccaaccaaagcctgcgaatgaataggaggggatgggggccggcactggggacgcccgccccagcattcccagcccggctctccgcaccaggcccccgcctcgttcgctaccccagatcccaacaagctcctgtcacctccttcaccctgaatgacccgggcatcccacttccctcaccagcgaggaggcccaggccgaggtagagatgcagcagatcgctggcgaaagccgagaagacgaagcccagcgaggcgaggacgcccccaaccatcaccacggggcgggccccccagcgcgtgctcagggcgctgcccacggggcctgaaagggggcggagtcaacggaagacacgcccccgggcccccaaactctctccaacacttctcattggctgtttgcctccctcgaactaatggttcttctccttgacctcaagatgcactcttttctagagccggttgccctttctcaggttgtcgggtaatcaggtgggtctcccatccctccactcacggctcctcctccccgttcctgtctcccgcctcagggcccccctcactggctgcctgctgcacggccagggccagggcgctgatccacgcagtgtcctgggcgcttcggtcaaagtgctcggcaaggtcagggaaggcaaggcccagcgagcgcagcagcccgtaggacagcccgtttatcgcgaaggctgcggccgccaccacccagccccagcccccatccgggggtccggcgggctggggggtcatcgccgtctgcggggtggggaaacatctgtgagagaagcctccacgcctgtgcttccgctggggagctggcatccctgagatccagcctctggctgctcgcccggggtgggcccgtcactccgagcgcgatggcgcggggcggagggagccggagcctggcctagggctggaactcccgggtccgcgcgaggtacggggacggggacagccagatccccaggcccgaggttccccgtcccacgcacactccttcccccttacccgacctctccgggcggtgcggggaggggaagggtgaggaagggctgggcccggctttctctctgcttcccaggcgggcgggggccccgaaggggagcgagggcagcgatggagcccaacttggacgggctctctcggtaaacagagatcaccacaggggcctgagccacctgggacgcggggtgtacggagggcgggggcgagctgaaacagccaatccggcaagccgcgcgtgaggccagacgccagtcccacggggattgaattatgtacacacacaacccccaggcccgggggaggggggagcggcgagaaatgaatgcagaggggccctgccctactcacacgcatgcacctgccgcctgctgcgcgcaggggagacacgtggattgcaaaccccagcgagcccagggtccaccgccaacgcgtggaaatagggatggtccccaaaacctgaggggatgagtagttttgttctcaggaacgttgccgaggaccaggtaaatctcggatatcaatcagatcacagacctccaccaagtgccagctctgtgcttagaataacagacccccaggccgggcgcggtgcaagcctgtaatcccagcactttgggaggccgatgtgggtgaatcacctgacgtcaggagttcgaggccagcctgaccaacatggcgaaacaccatatctactaaaaatacaaaaaaaattagccgggtgtggtggcgggcgcctgtagtcccagctacttgggaggctgaggcggggaatcgcttgaacccgggaggcagaagttgcagtgagccaagatcatgccactgcactccagcctgggtgacagagaaagactctgtctcaaaaataaataaataaacaaaaataaaataaataaaataaaataacaggtcctcaaggacagagggatgaaacacgactccctcaatgtgaagacctgcagtgtaccaggcaccgtttacacatgctatcacttcatcttatgataaccctatgaagaaggtgtcgcttttctttttttttttttttagatggagtttcactctgtagcccaggctggagtacagtggcgagatctcggctcattgcaacctctgcctcctaagttcaagccattctcctgcctcagcctcctgagtagctgggattacgggcgcctgccaccactcccagctaatttttgtattttttagtagagatggggtttcgccatgttggccaggctggtctggaactcctgacctcagatgatccgcccacctcggcctcccaaagtgctgggattacaggagtgagccaacgcgcctggccgatgtcgtgcctcttttatagatgcagtaactgaagctctcagggaaaaaatggtatggatatttgaatttaggtctgtccaactgtggacctacaaggagaacaatcccaggactgaaacaaaatctggcacagttaagggaaagatcctggatacagcttgaagcaaactgccctggaaagggtggaaccattgcagggacagaaaacttatgagtctaaaataaggggtcactgggaatagaaaggattcttgagatcagaatctctaaacacttaggttagaattttattttttattatgtatgtatgtatgtatgtatgtatgtatgtatgtatgtatgtgtgtgtgtatttatttatagagacagggtcttgtccaggctgaagtgtagtactgccattatggctcactgcagcctccacctcccaggctcaagcaatactccacctcagcctcccgagtagcgaggactacaggctccacaccaccatgcctggctaaatttgttcattttttttgtagagagggggtcacagcatgttgcacaggctggtctcaagctcctggacttaagcaatccttccacctcggactcccaaagtgctgggattacagtctaccatgcctggccaggttacaattttaaaagcaaagtaaaaaatcaggtcattgaagccaggtattgattttttgaaaaactttatagaaaatgtccttttttgataggttgacattctttacctcagctctttgaattcagagatgtgttctttggtttaattattaaacaatatgatagaacattcagcaacttaagtttggagcatgcatccattgagccacatgatggcagtgtttcctaattattgggaaagaatctgcacgtaaagacaagaaaaacagcttcttaaggagcaaaactgtaaacataaaagacacagcatgactataggcaatggctctccattgcctatagacgggaaaaattacatttctctatttgtacaggtcttttacaataatcaaaggtagacctaggttaccgttccaaaccatctcccctctctcccttttgccagcctcccatcagccactgtcttctctgctctgtggacatgcctagctttttctcactccttaatttttgcatatgtcatgctctctgcttgaaacgtcctgttgttcatgaaggtcctgacagacacaccttaggaaagtggccccaccggtttccccagcctggagtgctgttatgaaagccaccagggaggcggagccagcaggtcctcagctaccggggagggcagggatcccgcttcctgagaaggctgctgaagactctgctccaagctaaacgaatcactgtctccccatggtgacgcagaaatgcaggacagtcagagcgaagaccgggccctccgcatctgggagttgtgctaagtgatgctgcgcaccttcgcaggatgcttacgaagccagaagggtatcccagagcctgggactagggctgtgaaagagcacattcctcttctacctcaggctccctatattcttagcaaaacttgtcatcttttgctcacggaggtaaaatagcacagagattaggagaatggactcccaagctagatttcttgaggttgaatgccagctctactgtagggtctagccctacggggcttggcgggtgttttccccgtgtgcggagatgagagattgtaacaaataaagacacaagccaaagagatagaagaaaagacgctgggccctgggaaccactaccatcaagacgcggagaccggtagtggccccgaacggctggttgcgctgatatttattgcatacaagacaagggggcagggtaaggagggtgaatcttctaagtgattgacaaggtgcagcaagtcacgtgatcacaggacgggagggcccttcccttttaggtagccgaagtagagacagaaggcagcatacgtcagcgttttcttctatgcactgataagaaagatcaaagactttagactttcactatttcatctaccgctctgtactacgaacttcaaagaggaaccaggagtacgggaggaacatgaaagtggacaaggagcgtgagcattgaagcacagccccacagggaggggtttaggcctccggatgactgcggggaggcctggataatatccagccttccacaagaagctgctggagcagagtgttccctgactcctccaaggaaaggacactccttttcgcgatctgctaagtgatgggtgtcttcccaggcactagcgttaccgcttgaccaaggagccctcaagcggcccttatgcgagcgtgacagaaggttcacctcttgccttctaggtcacttctcacaatgtcccttcatcacctgaccctatacctgccggttattcgtaggttatattagtaatgcaacaaaaagtaatattaaaagctaatgattaataatgtctataataatgattgataattgtccatgatcatctctatatctcatttgtattatgactatttttattctattttctttattacactgaaacagtttgtgccttcagtctcttgcctcggcatctacgtaatctttcgcccacactctaccacttagtaactatatgattatgagcaagtgtgactcaacctctctgtgcctcggtttcctcatctctacaatgggggtaataacagtagctacctgatgggttgttataagaattaaatgagtcactgtgaatacacatataagtaaggaacttagaacagtgccaaagtatacgtgttagagctcattgccgctattttctttctttttttttttttttcttttttttttgagacagagtcttgctctattgcccaggctggagtgcagtggtacaatctaggttcaccacaacctctgcctcccaggttcaagtgaattctccagcctcagcctcccaggtagctgagattacaggtgcccgccaccacactcagctaatttttttgtatttttattagagacggggtttcaccatatttgccaggctggttttgatctcctgaccttaagtaatccacctacctcagcctcccttagtgctgggattacaggtgtgagccaccgcgctcagcctccattgccgctattgctgtgagttgaggaacctggctggacctaacagcacggcagccctttcccacctggctacctctgcccatgcctcaaggtcaaggcaccacattgccctggtaagttctcagtagagccacatgggttagaaaatgtgaatggctataaagagattcaatggaaatttctgcttttcttctttcttttcccttagcattttccaaagtttgtgtgaaaatgctggtctccctgccttaactctaaaaacaaaagagaaggccgggcgcagtggctcacacctgtaatcccaacactttgggacgccaaggcaggtggattacctgaggtcgggagttcaagaccagcctgaccaacatgaagaaaccccgtctctactaaaaatccaaaattagccaggcgtagtggcaggcgcctgtaatcccagctactcgggaggctgaggcaggagaattgcttgaacctgggaggcagaggttgccgtgagccgagatcgcgccattgcactccagcctgggcaacaagagcaaaactccatctcaaaaataaaaataaataaaaaataatagagaagaaaaaagtcaaaataagttttattcattcagtccttcatacaaaatatttatagacagctaccgcgtgccagctgctatgcttagggttcgggatacaaatgtgaataagatatagtctctcccctcccagccccacaatcaaatcagaggatcatcacataaagaaaagaattctcagcacaaggacggggacacatacaccgtagagtggtgcatgggaagaactgactcattcctcttaggactgctgggaggcttcacagaagaggagccccttgggctgggtcttgaaggatgagtaggagtttgccagatggatctgtgggcaggggcgttccaggcaaaggaagcagcttgtggaaaatcacaaaggcatgaaccagcttggcacattgtttattgtttggggagctataaatagccgctgtgtggagaaccgagcatgtgtaggaggataatgtaggattaagctgctgggcagagggtcccgtctgaaaggccttgaaggccaggctaaggatattcctccagaggctgatactactccaaaatgtccaatgaagtagcactcactaatactcactaataatggaagctgaatacagaggagagatgagtcatgccacaatcagaggcgcaaggagagttcgccttttgcatgtgggaaatttctttgaaatatcttgttttatgttaaaaattcatgcagaatttttcattctactttttttgtttgtttgtttgtttttgttttgttttgttttgtttttgagaccgagtctctctctgttgcccaggctggagtgcagtggcacaatctcggctcactgcaagctcggcctcccgggttcaggccattctcctgcctcagcctcccgagtagctgggactacaggcacccaccaccacgcccggctaattttttgtatttttagtagagacggggtttcactgtgttagccaggatggtctcgatctcctaacctcgtgatctgcccgcctcggcctcccaaagtgctgggattacaggcgtgagccactgtgcccagcccgatttctggaattctcacacacaaagatgccaaaggtgagtgatgaatcactgaatgagagaaacattgaacaaaggagtcattgaatgagtggactccgtgcctggtgctccacagaatgcagcagtggtacaggaaagagtcgcagatggaccaaaccacgaaggcctgcccatgtggggacagccctcaaagcagatgctgagctagatgaagtctatagggagatcgtaaaagagtgtcaagcatggcacatcatttgctttggggaccacaggatctgggaatgcgtccatgtttgcaaactctaaaactgctctggggctttttcatgggaactcctgccggaggttctcggggcctctggagtctgcagcctcagggaagccctgaactaagcccctctatttcccagcacccccaccaaggggctcccgctgcagaaggtggacagggagggaggcgggcaggcaagagtgagtggcgttacccacaggaaacattcctctatttggggtgctcagaaatatgaggctctacactgcttggctcagctgatcttgggttgttttttgagactgattttcactcttgttgcccaggctggaatgcaatggcatgatctcggctcaccacaatctcagcctcccgggttcaagcgattctcctgcctcagcctcccaagtagctgggattacaggcatgtgccaccacgcctgactaattttgtatttttagtagagatggggtttctccatgttggtcaggctggtctcgaactcccaacctccagtgatccgcctgcctcagcctcccaaattgctgggattacaggcatgagccactgcgcctggcctgggtttctaagacctaatagagctgcctctcacccctcaccccccagaatgccctcttccctggatcacccagagaccaggccgtggaaagtcagcgtagatctaaagcccacaccagggcctggaaaagtgggagaagcacacgacctgcagaggggataaggacacaaaggtcagggtttgtggctcagggccaggtagcacgtcgctgagatgctctgaaatggggagtgggtcattgaagcaggaggccaggggctccttgtgtatcgggaacaagtctgcttggacgaccatatcaactggaagaagggagatggagccgagtctcctgagccttccttgtgtggggactgagactgcggtaggactttgctgagtctgaggctgtggggaagctggtaatagggttgagggggcacagatgagacagagctaaggctggagctggattggagccaaggccttggatgggctgggaatcctacctcacattactcttctttctttctctttctttctttctttctttttttgagacagagtctcactctgtcacccaggttggagtgcagtggcatgatctcggctcactgcaacctccacctcccaggttcaagcaattctcctgcctcagcctcccaagtagctgggattataagagctcaccaccacgtccggctaatttttgtgtttacattactcctttcttataccctctaccaaatctgtctccagtgccttttccaatccaggcctcatcccttccctctgtcgtcaccatccccttcccaccctattacatgttgggggtctggaggacctgattcctgggtctctctggacagcccagaatccaggacaggggatcagggacagtaggggaaagtgcccagctaaaggctctgcacctggtctgtgtctaaatctccaaacgtgttttattttgttttgttttgtttttttgagacggagtctcgctctgttgcccaggctggagtgcaatggtgtgatcttggctcactgcaacctctgcctcccgggttcaagtgattctccttcctcagcctcccaagtagctgggattacaggtgcccgccaccatgcctggctaatttttgtatttttagtagagatggggtttcaccatgttggccaggctggtctcaaactcctgacctcaggtggtccgcccacctcagcctcccaaagtgttaggattacaggcgtgagccaccgtgcccagcctaaatgtgtcttacctggcatattctattaacagtctgggactttggccaacatctgtatcaaagttgtgagtcgtaagccatgggcactaactctgacttatttaaggaaagaaatgatttattacaggatactgcgtagttcacaaaatcaccaagaaacctacagagccaagattggcagaagcagaggccacgagcctataatgggttgctaaagccgctgttatcaccacaggacactagatgtcgctgctggcagccctctgtgaccactgggcctggaaacagctgctgctcctcggacgtgttctctgcttctgggccctcaaatctaagtccagtgatcctgaccaccggaacctaggccacgtgctttcatcctagctggaaggggtggcaggaagagtgagaacctagtgctttcagtgtctatagacagatgggttctgcctcccttcaaaaataataaggtgggcctgggcacgcggtggctcacgcctgtaatcccagcactttgggaggccgaggcaggtggatcacctgaggtcaggagtttgagaccagcctggccaatatcgcaaaaccccacctctactaaaagtacaaaaattatccaaatgtggtggcacgcatctgtaatcccagctacttgggaggctgaggtgggagaatcgcttgaaccagggaggcagaggttgcagtgagctgagatcgcgccactgcattccagcctggatgatggggtgagactccatctcaaaaaaaaaactaataataataaggtggaaattttcttaaaggcttcagatgcaagaaggccaaaaatatcctaaaactgtgtaagcccaactaaaatggattattagaataggaatgagaatccaatcggacctggtgatttttttttttttttttttttttttttgagatggagtctcctctgtcgcccaggctggagtgcagtggcacgatctcggcttaccacaacctccgcctcccgggttccagcgattctcctgcctcagcctcctgagtagctgcgactacaggcacccgccaccatgcccggctaatttttgtatttttagtagagacggggtttcaccatattggccaggctggtctcgaactcctgacctcgtgatccacccacctcggcctcccaaagtgctgggattacaggcatgagccactgtgcccagccagacctggtgagttattaaaagcacagtccctgagttccgactcccaccatttccaggcatctataaaaagggggcaatgcttcaaaggattgttggtgagacttcagtgaagtaaagcttgggaaggacccagcacaactccaggcacagggcaggcgtcctacaaatgtaggttcccatccatttcattccatcccattttctagccaccggtagccaccctttcatctctacgccagtccaattctactccaagtcactatgcccctcctgtctggatttgtgaggggcagtcagaccagaaggggccagaaggtgatatttgtcatctccctgctgctataccaacctctcagctacctgagttttttgggtccctttgtctgccttcccagcctcagcctgagacctgggcatctgacttgaaggatgcaggctcttagtggacatggtaacccacatcagcccttagggctgcagcagccctgcctggccagagtctctacctccccaaggaatatcaaccaggaccagaagccaaggcaggaggggacaggaggtcagataacaggttttctgcagggatgtaaattacacatcttggaggatctgacatatgcaaggcagagttttgggggcccagtaagcaaatggtgcctgttttcttgccccaaggcagaaatgcctttgtgaacactgggaggagtcgcgtgggggctaagccctgagaaagtcccaaagtcatagaagggcccagacgctgaagaggctgcaactggctgcagtggatgccacacaagcctcttcctgtccttgtgcaggtggatcttgtccctcccagtgcgttcctttctgtacctcttgttggccatgaatctcctttgcccctgcccacatctccatgccatttcctctgcaaagctttctcctgcctctcccctactgtcaaaacgttttaaatgctgggcagcatctcttctttagggttccttccctctatcccattcaaagagccatacccagctttagctacctccatctcaagctttcatcctatctttctctcctccattcacaatcaggagtcccttgcaatgagaccgattctggtttaaaacacatttgtgagggacgggtgtcatggtctcacctggagggaaatcacacctgcacaggcctacagagaggtgaggcggggcctcgggcatctcatcaactgggtacgtagaaagaggactctgatttttttttttttagatggagtctcattctgtcacccaggctggagtgcagtggcgcaatctctgctcactgcaacctccgcctcccaggttcaagcaattcgcctgcctcagcctcccgagtagctgggattacaggcacatgccgccatgcccggctaattttttgtattttagtagagacagggattcaccgtgttacccaggctggtggtgaactcccaagctcaggtaatccacctgcctcggcctcccaaagtgctgggattacaggcttaagccaccatgcccggccgagcaccctgatttatgggtaatcagcttccccttccctgggcccagggatctgggagataggaagttgatgccaccgccccaagagctgatgtttcaggactgtggccagtgagtgctgaacacagtgagcagcagagtgggctgacacctgagctccaggactcataaagccccgctgttcttgcatggcatgtggtttctgggtttatttccctgttgtccttgaggagagtatatttattccctaagtatgcagggcttagggctaaaagcattccccatgcttacagaaatgctagggatatgaaaaagtgtaccgatttccaaatacaaaaggcaaacttaaaaatctaaagtaatgaatattaaagcgtttttaaaaatgtctacaaaacataatattagtccatttctttgttaaatttcatgttcctaaattttcattacattggaaaacaatttgaagctttttttcactttgcaggatttcctaaatgtttatcgtgattgctgagaaatcagagccaatcatagattcactgagtttcttatagacaaacaatcctttaaaagaataaacgtccttttaagattttaaacggcaaaaaatcttagaaatcttttaaatttttgggccgggcacggtggctcacgcttgtaatcccagcactttgggaggccgaggtgggcggatcacgaggtcaggagatcgagaccatcctggctaacagggtgaaaccccatctccactaaaaacacaaaaaaattagccgggtgtagtggcgggcacctgtagtcccagctactcgggaggatgaggcaggagaacggagtgaacccaggaggcggagcttgcagtgagcagggatcgcaccactgcactccagcctgggcgacagaacaagactccgtctcaaaaaaaaaaaaaagaaatcttttaaatttttaattgtaaaaatatatttagtgtggaatgtgagtgtattttagtatatgttattaagaggcaacataacatggtgggacaaacacgaaccctggaaccagattgtctgggttcaagccctggctttggtacttactggctatataacctagagcaagttattcaacctctctttgcaatagttccctcatccccaaagcaaattataatagttcctacttttgaggaaaaaaaagatggtaattgctatgatcttaatgtttgtgcctctccccgtcaaattcatatgttgaaatctaatcccaggccgggtccggtggctcacgcctgtaatcccaacactttgggaggccgaggtgggcggatcacctgagatcaggagttcgagatcagcctgaccaacatggagatactctgtctctactaaaaatacaaaaaaattagccgggcacggtggcacatgcctgtaatcccagctactcgggaggctgaggcaggagaattgcttaaacctgggaggcggaggttgtggtgagccgagatcatgccattgcactccagcctgggcaacaagagcgaaactccatctcaaaaaaaaaaaaaaaaaatctagtccccaatgcgaagtattaagaggtgggtcctttaggaggtgactgaggccttcatgaggatgaagaccttgtgaatgagattgagtgcccttatgaaagaggcctgaggcagcctgtccactccttctgccctgtgaggacacagctagaaggtgccatctatgagagcaagcccttaccaaacaccaaatcttctggcttcccagcttccagaaatgtgagcaataaatttctgtggtttttgtttgtttttcagagatgcgtctcactttgttgcccagactgctcctggcctcaagcagttctctcaccgcagcctccagagctgctgggattacaagcataagccaccacacctggctcaaatttctgttgcttataaattaatagtttaaggtatcttgttatagcagcccgaatgagttaagacaataatgatagtaccttgttactattagcacgacttcttaggaatgttgaaaggattaaaggagttaatatttgtacagttttttttttttttttgagacggagtctcgctctgtcgcccaggctgaagtgcagcggcgcgatctcggctcactgcaagctccgcctcccgggttcacgccattctcctgcctcagcctcccggagtagctgggactacaggtgcccgctaccacgcccggctaattttttgtatttttagtagagacggggtttcaccgtgttagccaggatggtctcgatctcctgacctcgtgatccgcccgcctcggcctcccaaagtgctgggattacaggcgtgagccaccgcgcccggcctatttgtacagtttttggaacaattcctagcaagaagtaagggctatttaagggtatgtttttttgttttttgttttttttttgagacagggtctcactctgtcacccaggctggagtgcagtggtgccatcttgcctcactgcaacctctgcctcccagattcaagcaattctcctgcctcaacctcccaagtagctgggattacaggtgcccgccactaccgcccagctaatttttgtgtttttcatacagacggggtttcatcatcttggccaggctggtctcaaactcctgaccttgtgatccaccagcctcggtctcccaaagtgctggcaaactcctgacctcgtgagccactacacccggccacttttacatttttttatacagatgggggtctcacttttttccccaggctggtgtcaaacttctggcctcaagcaatcctctcacctcggcctcccaaggtgctgggattacaggtgtgagccgctatgcctggtggagcgtcttttataaggtcataatcccattcatgagtcccccattctcatgacctcgtcgcctcccaaaggctccacctccaaataccatcacattaggctttaggagttaacatatacatttgggggacagggaaacacagacacattcagtctttggcatcccacatatcaataaaactagagctaggaatgctccaaaattagcttatcagtgtctcaataacatcatcaaagactaaggttcttcccacattttcagtctatcccctcagtgttttagctttttcctcgtaaggttgcaacgtggttactgcagtttcagatatggcatctaggcataaccaagtgcagaggaaaatgagcacgtctcttccagtgtgtgccccttagcaccaaggatcttttatcctacagcccccagcagacagcccctcggccattgacagaattatgccgtatgtctatgattaaaccagccactgacaagggggaaggttccaccatgattgacttactttcatcaggtcctgcctctaggactaggctggagccaccctcacctgaaggttatactgtacctacattgctgttgtagaataacataaattcctaaacaccagttggggtcagttaagagaggacaaagctatagtcaatgttgcatagaaaaccaagagtggtttgttttgttttggtttgttttagacagagtctcgctcttgttgctgaggctggagtgcaatggtgcgatctctgctcactgcaacctccgcctcccgagttcaaccaatcctcctgcctcagcctcccgagtagctgggattacaggcacccgccaccacgcccaactcattttttgtatttttagtagagatagggtttcacaatggccaggcttgttgcgaactcctgacctcaggtgatccaccctcctcggcctcccaaagtgctgggattacaggcgtgagccaccgcgcccggcccaagagtgttgactaaaccatctagaactccctgttggtgcctgaaggggactattcttgggaatctggtgaggtttttttgtttattactagtaatgtgatttgttctgatttttaccagcaattcctccctcccccactaaacatacactgcccaaggggcaagaagaaacacctacactgtgtgtgaagaacctggcattctgtcatatctggcatgggcatcaatggtccataggcatcaatgtagcagcaatgaatgaatgtgtatctctcttccccagcctagatgactacagctcaattctaactggtcttcctgcacaatgtggattccacaatgttgatagaaccagcttctaggttcaggaaggaaaccaggctgattctcaggcaggaggaggcagagtacgtatgactcaatccctctttgcctttaatgaaagtgacggagaagattttccgcttaagaaggaggataccctgagaatttataaaagcctgaagagcagtcgtggaacacagaggacagcaaaggcaagagaggggtgattccagttccttacgtcgagaagtagagacctgcctctacctcagtatttgctctgattggatgttgtgaactggtaaagatttctggattaatgtgagtggtcagagggcaggggagcataatggcaaatgaggtcacttcctattcactcatgtccctctgatagagggacagaacccaaatgtagctcaacagttttgctgatgtatgggaacaattcctttcagtttttttgcaactgccatctaaacagtttttctacagacgtccaaggcagtctcatctcattctgttccttgtgagcttctggaacagaattactccattcctagtctcagttcatcatggtcaaggtataaaactggagagctggccaggcatggtggctcacgcctgtaatcccagcactttgggaggccaaggtgggcagatcatgaggtcaggagatcaagaccatcctggctaacacggtgaaactccgtctctactaaaaatacaaaaagtagccagccatggtggcgggcacctgtagtcccagctactcgggaggctgaggcaggagaatggcctgaacctgggaggcagagcttgcagtgagccgagaccgtgccactgcactccagcctgggggacagagcaagatgccgtctccaaaaaaaaaaaaaaaaacaaaaaaaaaacactgtagagtttatgtgttaacttctttattttattttattttatttttgagatggagttttgctcttatcacccaggctggaatgcagtggcacaatcttggctcactgcaacctctgcctcccacattcaatcgattctcctgccttagcctccagagtagttgggattacaggtgcctgccaccacgccaggctaatttttttttatacttataagtagagacggagttccaccatgttggccaggctggtctcgaactcttgacctcaggtgatgcacccgcctcagcctctcaaagtgctgggattacagacgtgagccaccgtgcccggccatgtgtgttaacttctgaatgggctgattttaggtggtagtagctatgcctgagtgtatagaaggtataaatatcttgctctgtcattcttagatggtgcaaatcaacctgtggaaaactgatagaagcggtgccaactgctcattctgatttatttaatgggtttcttttctcattctgaaaccattctatcaaatggcaatagactgttcctgtagacccccatgaagtaatcatgtaccacacgaataatacacaatgagattgctttttcacttataaaacatgaccagttatgactcattctgacatttcaaagcctaagaatcccaggggcactactagaagcatttgtctacctttctagcatgattcatatatttgcttcagattgtgttaacccttgccattctttttttcccaaacctggaagtaggttaactgtaagataagtgtatcttctcattccagatgagaggcaggatgtgcaggtcactttactcagtgcctggcattaagccagtggtggacccactatgtggacagctaaactcccagctttctgccttccgccaagggtcacaccgcattcaccttgttacagccgctaaacagacttgactcagctttcccttcagagtcatgagacagctgccactgttccaaatctcctgccctcacaaggaaacacccacgacaggaaggtaacaagcacagctcctcttttacagccttttttttttttttttttttttgagaaggagtctcgctctgtcatacaggctggagtgcaatggcatgaactcagctcactggcaaactccacctcctgggttcaagtgattctcctgcctcagcctcccgagtagccgagattacaggtgcctgctaatttttgtatttttagtacaaaaattaattagcccgctaacctacgactggctaatttttgtattttagtagagacggggtttcaccatgttagccaggcggtctcgaactcctgaccttaagcgatccacctgcctcggcctcccaaagtgctgggattacaggtgtgagtcaccatgcctggccaatggctttcttaccttgtgtgtctgtgtctcttcttgtaaggacaccagccatattggattaagggtataccctactccaacatgacctcatcttaatttattacgtctgcaacgaccctatttcctatttccaagtaagaccaacttctgagatactgggggttagaacttcaacctgtcttttgtgtgagacgcctttgtataatgaatagtctctgcattacctaaatccaaagattttctgtagtttatgacccaaaattccttttttttttttttttttttttttttttttttgagacagagtctcgctctgtcgcccaggctggagtgcagtggtgcgatctcggctcactgccacctccacctccaggttcaagtgattctcctgcctcagcctcctgagtagctgggattacaggtgcccaccaccacgctcagctaatttttgtatttttagtagagacggggtttcactgtgttggccaggctggtctccaactcctgacctcaagtgatccgcccgcctcggcctcccaaattgctgggattacaggcgtgagccatgcacctggctccaaaagtccttctgatatagaactctactattataggagttcaaaccagtccagccgaacaagcaccacacatgtcttccacagtctcatcccctccttacctaaaactccttatctctaggagcaacctagaaaatttttatgatcaccaaagagcagttttatctccttctaaccaaagtcctttttcagaagagggtcttgtataactttgaataacaaagggtgtgtttgcacaattcaagagccagcatgagaagtttcctaaaattgaagaacagtcttctttcaaaaagcattcttgccacctgcctggacaacatagcaagaccccatctctacaaaaaatttttttaattagctgggcatgctggtagacacttgtgacccttgctacttgggaggctgaggcaggaggatcccttgaacccaggagttgaagaccgcagtgagctgtgacagtgccactgcactccagcctcggtgacagagtgagagcctgtctcaacgggaaaaaaaaaaaagtgttcttgccagacagaggaacattcagggtggtggtagttgttttaatatgtgaaaatgtagcttttaaacatcactattttggccaggcatggtagttcacacctataatcccagcactttgggaggccgaggcgggcggatcacttgcagtcaggagttggagaccagcctggccaacatggtgaaaccccgtctctactaaaaatacaaaaattagccaggcgtgatggtggacgcctataatctcggctactccggaggctgaggcaggagaatcacttggacccaggaggcggcggttgcagtgagctgagatcgcgccactgcacgccacagcctgggcgacggagccacactccatctcaaaaaaataaaatatactcgggaggctaaagcaggagaatcgcttgaacccgggaggcggaggttggggtgaaccgagatcgtgccattgcactccagcctgggcaacaagagcaaaactccgtctcaaaaaatataaaaataaaaataaaataacactgttttgttgcatcagctgtgcccgatcagctgagcttcttcccagtccctgccccactttgagtatgcttaatgtatggagcctgtcaccaactgaatgccctaatttaacgtaatcccactccaagcattccagcttctcagagctgtgacaacctcccctttctgcccctccctggtgcctgcaacctgccccacatcatcctctcccaatcaggctgaattgtttgattttgttttcactgtgggggtgaccgttatagcatgatcttattcatttatctgatggcttttaatttaaatcatacaatgtatgcaggtagaaaaatccaagcagtgcagaaagacattaaatgaaaggcctacagtagataatatttggagcagccaatgaagtctctttgtcaccatcatcaaacccctgtgtaagcattatcctgccccaccactcaggcctcagtgacagctctccttagtcacagccctaaattgggggtgggtatgaacaatagacaatataagtcagctgcatttctgaatggattttcaaacctctaacaaaagcgaactcctgaaagccaaaaggtgattctagatggcaagagtcaggccacagaggagagaaaagattttttgaatttcaaaggtttgactttcaacaccaacagccaacgtttccaggatgcagatcatagaggtgactgcctaaagctgagtccagaaataagaaataagacaataatccaatgctagcctcactgcattgcagaatgagatacagttccactggggaaagagacaggaggatcagaaagtgagtcatcggtgtggttcattgtaaaagggatcagagctctgtccactgatagggtcgaacttctgggaacaaggatgattgaatgtgcatggggttggggttgaacagagcagaaggggttgtgctttgcttctcaggtgaagggcaggcaaaagacatcagggagacgcccttgcagcagcaggcaccagtgacagaaggcagggatgacagctggtgtgtgggcaaagggagccgaagaaaaactctgaatctcccatcaccccaaagagcagcaagagagttatctaaagattcctgcatcctcagaggtttgtgtaagaggtaaggttgagccagcagacacacaggcatggtacatgcggcaggggggatgcagggtgacctgtgtgaccaggagcctgcagaacagaaagaagtgtggacagctcaggggaggaagagagagaaggagaagcagacacctgcaaggagaaggccccactccaaagagatacatcatccccaagaaaaacagggcgaagagggaaaggagagaatccagaattgaccgaggccaaaaaggacagaaaatctagcagtgactggtgattcagagtcggccaggtggttttctgctgttagcgataatgtgtgcaccagagcactgccagggtctggcagagagaactaagtaaaattcccgtgtgagccctggggttgtggaataccatgtctgctccttggcaacctccttccctccacccacctcccagcaccaggagctgagattacatcagtggaagagcagctgtggttccccctcctggggctctgtccatgaggtagggcagacatctggactagcgatggccaggggatgggagcacagaggaagaagcccagagttacagagggacttagaaccacaggaagttcctttttctacagggaatggggcagcctaccctgaaagaagtcattttgttctgttttgtttgagacagcgtctcactctgttatccaggctggagtgcagtggtgtgatctcagctcaccgcaatctccgcctcccagattcaagcgattcttctgcctcagcctcccgagtagctgggactacaggcatgcgccaccacgcttggctaatttttgtatttttagtagagacagggtctcaccatgttggccaggctggtctcaaactcctgacctcgtgatccacccgcctcggcctcccaaagtgctgggattacaggcatgagccaccgcgcctggccgaatttgacttttctagattccacatataagtaagatcatggctcatttgaaggatgagtagattctaaaccaggggaagatggggactaccaaggtgatcgtgaaggtcagtggagcagcatccgggtcagggacagaggagtgaactcggaccgtgaaggcaaagctgagcagagtgccagccacaggcggatggtgcagtcacctgaaatgtgtcccatcatctgagtcgtccctcattcccaagctcccacatattcacagaggcccatcctgacatatatgctgcctttgaaggtctggacaaatacctgagacacacatgggtggtgttgacttctctccaccccagatgtaggtgctcctaggctggggatctcatcagctcttcctggagtggacggcaaccaggtgggggttctccagctggtggagtgttctcagcctcgggccaaaatgcctaaaagcaggatggccggtggcagctgtctttgggctctaaccagctcccagggcagaaggttcccatggagcctgatggatagaggccaggttcccgtgggggagggcaacatggcaggatgaaggctgggcatggagccctcctcactgaggctctcaagggcagccatgttacagatcaggtcattgcaggtcagtcaccagctgcaggacttgggggaacatggtcatctatcctggggacatacacagatgggcagtgggggacagcaaaggtcccaggaggtcagacacccctaatcccttcaacagtgccttggcctggccctagcagctctcaaactctccacacacaacattgcaaggtggtctcgaacctgctgagttcctgctcctgcttctccagcttgttctccacactgtaccatgtagtgtcactcacactgcaggctggaggggctcagtggctcagcactcacaaggctgctcccacccatgcctttgtcctgagagcccaccagacacttccacccacgctccttgggggtctctcacctgcttgcagttcccgttcatgtttctgtaccttgatttccagagcagtcaccattttttgcaagcttccacctggaagataagggaactcagtccccacgagtcagttccccccactccccacccagcctcactccaagccaggctcaccctgggaattcagtgccagaacctcacccacgttgcttgacatgaaagggctgaaaaattttcagggactgcaggtccatctgatgtggagaaactgatcaggtggggaatgtgtttggggtgttcagacctgagattcatcaggtggcctctgtgccagcactgagcagggcactcacacacagtgtctccttcagtcctcacagtcacccagcagggcaggcactatcgtagtcctgatgttataaaggatgaaactaaggcttagagaggtaacgtgatctgtccgtgttgtacaactagtaagaaagagccaggattcaaggttctggtgtgtttgactacaaaacacctagtgcctcctcatggatccatcaccatcatcatcacagcccaacactgccctcatgtctctcccacagttgccacacagctggcccaaagctgccctcatcactgtccccaaacactctgccataattgcctatattagtccattctttaactgctataaagaaatacctgagactgggtaatttataaagaaaagagctttacttggctcatggttctgcaggctgtacaggaagcatggtggcacctgtttggcttctggggaggcctcaggaaactcacaatcatggcagaaggcaaagggaaagtgaggcatcttacatggctgaagcaggagaaagaaactggggggaagaactggccaggttcaatgactcatgcctgtaatcccagcactttgggaggccgaggcaggtggatcacgaggtcaggagttcaagaccagcctggccaacatggtgaaacctcgtctgtactaagatacaaaaaaattagccgagcatggtagcgagcacctgtaaccccagctacttgggaagctgaagcaggagagtcacttgaacctgggaggcaaaggttgcagtgagccaagatcacaccattgcactccagcctgggtgacagggcaagactctgtctctgaaaaaaataaaaagtagggggaggtactacacacttaaacaactcacacactatcatgacagctgcaccaaggggaatggtgttaaaccatgagaaactgcctccatgacccaatcacttcccactaggccccacctccaacaatgggaattacaatcgaatatgagatttgggtggggacatagatccaaatcatattattccacccctagcccctcccaatctcatgtccttctcacatttcaaaatataagcatgctttgccaatagtcctccaaagtcttaactcattccaatactaactcaaaagtccacagtccaaaatctcatctgagacaaggctagtaccttccacctataagcctgcaaaaatcaaaaacaagttagttattcccaagatacaatggaggtatatacattgggtaaatactcccattccaaaagggagaaatcagccaaaataaaggggctacaggatgcatgcaaatctgaaatccagcagggcaatcattaaatcttaaagcttcacagtaatctcctttgactccatgcctcacatccaggacacactggtgtgaggggtggcctcccaaggtcttgggcagctctgcccctatggctttgcagggttcagcccctgcagccactctcatgggctagttttgagtattgtgcctgtagcttttccaggcacagggtgcaagctgctagtggatctaccattctgggatctggaggatggtggccctcttctcacagctctactaggcagtgccccagtggggactttgtgtgggggtttcagcctcacatttcccctccccactgccctagtagaagttctctataagggctccacccctgcagcaggcttctacctgaacatccaggcttttccatatatcctctgaaatctaggtggagactcccaagcctcaactcttgtattctgtgcacctgcaagcttaacatcacatggaagccaccaagacttatgacttgcaccctctgaagcagtagcccaagctgtacctgggccccttttatccacatccagagctgggtgcagagaccagtgtcccaaggctgtgcaggacagtagagccctgggcctggcccaataaaccattcttctctcctaggcctccaggcctgtgataggaggggctgccatgaaggtctctaaaatgcctttgaggattttttcccattctctttactattagcacttgccttcctctcagttatgcaaatttctgtgacctgcttgaattcctcccctgaaaatgggcttttcttttctaacacgtggcagagctgcaaattttccaaacttttatattctccttcccttttaaatgtaagtgctagttttaggtcatttctttgctcatgcatatgaatatgtgctgttagaagcacccaggccacatcttctacactttgctgcttagaaatttcttccaccagataccttaaatcatctctctcaagttcaaggttccatagatccctagggcatgggcacaatccaaccaaaatttttgccaaagtataaaaaaagtacctttgtccctattcacaataagtttctcatctccatctgagacctcattggtctggccatctctgtccatatcactaccagcatttgggtcacaaccattcaacaagtctctagaaagttccaaacttcccctcaccttcctgtcttcttctgagccctccacacttttccaacctctgcccattaccaagttccaaagtcacttccacattttcaggtatctttatggcaatgctccacatcttggtaccattttattagtttgttctcacactgctataaagaaatacctgagactgggtaatttatacagaaaagaggtttaattggttcacggttctgcaggctatacagcaaggatggtggcatctgcttggcttctcgagacacctcaggaaacttacaatcatggcggaaggtaaaggggaaatatgacatcttacatggccgaagcaggaggaaaagagagcagggaggtgctacacacttttagacaactagatctcacgagaactcactaccatgacagaagtaccaagggggatggtgttaaaccatgagaaactgctcccatgatccatttatctcctaacaggcctccagcattggggatcgcaactgaacatgaggtttgagcagggatagattcaaaccacatcactgtcccaccactgctccaacacttttgcaagattttttcttgcaaaaaaaagactttttctctgaccatccatcactaaacctgtacctcaccattaccaccacaccactacaccccattatttctgtcttctctgtccaccccgtgaccctcactttgggatcggaccacacagatgacaaccaggagcaggaggccgaggcacagggacagcaggaggaggcagtcccagagtgcagatgctgcaggagggcctggggaggaggcagccctcaggaggagggggtgtcaagacgaggagcgtccaggacatgacagagacgggaagaggagaggggccagggagctgtctagagaggagggctgagcataaaggacaccaggaaagggcgggatgggaaggatttcagggtgggggatgcccaggcctttgacctcagggaccagcacaagtcctcagtcacacaggcccctcacacccgtggggaccaccaaacacacacacacagatgggggataatggagatatgtgaggtcccatggtcagagctgaggaaggggcagaaggacacagggagagctgggggcagccaggcccttcataggctcacgctcatctgtgaaagcaggtgaaattatggtcttcctttgaagactttcctaaataacccatgtttttcctgcttcctgtccctgtgccactgaggaccctaactcccctgaagactaggaccacagaggccaggccctgaaccctcagagagggggatctccacagtccatactggagtcacagaaatgaccaaaaccaggagccctggagctacagcacaggggagacatgagaaacccctcattgcagatagaggcattgtcggccgggcgcggtggctcacgcctataatccctgcactttgggaggccaaggatcacctgaggttgggagttcgagaccagcctgaccaacgtgcagaaaccccgtctctactaaaaatatgaaattagccaggcatggtggcgcatacctgtaatcccagctactcaggaggctgaggcaggagaatcacttgaacccaggaggtggaagctgcagtgagccgagatcacatcattgcattccagcctgggcaacaagagcaaaactccatcaaaaaaaaaaaaaaaagaaagaaggaaagaaggaaaagaaagaaaagaaaggaaaggaagaaaagaaggaaagaaagaaaagaaaagaaaggaaagaaaagaaagaaaagaaagaaaagaaagaaagaaagaaagaaagaaagaaagaaagaaagaaagaaagaaagaaagaaagaaagagttactgtctctgagagaggcaccatccttagactagacctcctgggcttcacactttagagggccctcactggccctcctgtgactccatcccttcctgtgggactgggaatctccagggccaaggtgatgtgctcaccccaagccatacctgcccttctagaccatcctctgggtacctgggagcccagatcgtccacccaggcagctgtacacctgtcttccccgggcctgtcccctgggtggcagaccctgctcctggtgtgcccaccctgaggctcaagtggtagccatgggcagaggttgggggggtgaatggagggtgtggaccatgctgaaggtgtcctcacgtgtcccccaggctcctcaaggtgcaagactgagctgagggaagggagcaaagggaagtgagctcaagaggaactagctcaggcctctgcaaactttgaggggtgggcctgtctctggggtcttctgcttgtcttaccttttctttttcttttttttttttttcttgagacagagtctcgctctgttgccaggctggagtgtagtggcgcgatctcggctcactgcaacctccgcctcccaggttcaagcaattatcctgcctcagcctaataagtagctgggactacaggcacccgccaccatgcccagctaatttttgtattttttagtagagacaggtttcaccatgttggccaggatggtcttgatctcttgacctcacgatccgcctgcctcagcctcccaaagtgctgggattacaggtgtgagccactgcacccggcccaattttttatttttagttgagacggggtttcgccatgttggccaggctggtctcgaactcctgacctcaggtgatccatccacctcagcctcccaaagtgctgggattacaggcgtgagccgccgcacctggcctgtcataccttttctaagatcatgttccttctcactctctaagcacttgagatcttcatacttcattgacatccttggcccaagtggtctctgtggctgcaggagctgagatggaggcagagaaagggctccgagggggagcctgaaataagggctggaggtgggtgtggagctggttttgaggtaggaagtgaggattcgatagtggctgagccaggcgtgagaactaggaatgtggctgggggctgggtttgcaggtgaggttgaaacagcgatcacaattggggttgtatctggggttaggatggggttgacttacttggggctaaaaatcagattgggtctcaggctaagattgtagacagggctcctttggagttgggtctgagtttggggctgagattggaaacatgtgggatggagcatgggggtgtagtacagctaggctggagctgcagtggggacagagattgaatttagggatgaatttagagccgacattgggactgcagttggggctggaactgggattgtattggtttggggctgtccaacccaatctggaagtcagtggagagatcatttcaatctcctccaataactagttcaatctgtgatccatcttcccagttatttccacctataacacaaagtcgccctctccatattttccctaatgccctccctgcctccgccgtccagttacctgtacaaaactagagaatgtaattgtttgctttcttaggtagcagaattaccaggtcaggaaattctagagggaactgacttgtattggttctcctgctcccctctacattctgtggccctggtagaactgtgatctcacgctcctgctgggtggcttctctcccatgatccaaaatctttcagacccaggggagagaggcacagagctgcttgggtggatgatctgggtggatgttctttacttttgtgccttcaggcttcagagtggtgatgtctctgctattcttagccacagggacttcaccaacttttgttggcttcctcaaccctgctcacactctgtaaatgtcattaaactcttttcaataaacccttttgtggccaagcactgcagctcatacctgtaatcctagcagtttgggaggccaaggcaggacaatcgcttgagcccaggagtttgaaaccaccctgggcaacatagtgagaccctatctctacaaaaaataaacttagccaggcatgggggcacacatctatagtctcagctactcaggaggctgagaagagaggattgcttgagtccaggagttcaaggctgcagtgagctatgatcgcaccactgcattctagcctgggtgacagaacaagaacctgtctctctatatatatatgtagagagagagaaagagaaataaatcctttggttttgacacctgtatcttgctggaactgattaaaaaaaaaccctttgaataaaattataaatgtttactatggtacacagaaaaataaaaaagaataaactccatttggaagtctaacaggctcctcaaactcaacatgttcaaaataaagcttcttatctcctcatcccacccacaaaaccagcttctcacacggtcttcccatcttaattaactgggactccatccttctaggttttcaagccccaaacctggaattatccttgactttctcattttcccaaacccctcagacaacccatcagcaaatcctgacagctaattcagacattcctatatgccagggagctttctgggtacagtaatacagcaatgaatgggtcctgccatcccttaatgaacttaaaaagttggttcttaatagctgaaatgcagctgggtgtggtggctcatgcctgtaatcccagcactttgggaggccgaggcgggctgatcacctgaggtcgggagttggagaccagcctgaccaacctggagaaaccccatctctacttaaaacacaaaagtagccagacatggtggcaggctcctgtaatcccagctactcggaaggctgaggcaggagaatcacttgaacctgggaggcggaggttgcagtgagctgagatgacgccattgcactccagcctgggcaacaagaaggaaattcccgtctcaaaaaaaaaaaaaaaaaaaaaaatcaaaatagctgagatgcttccctggtatatgctggattgattgaaaaaacagaaatctccacccctctctatatccattctctacacagtatgactttgtagacccccccccaaccccccaccaaaatgtggaatctatttctctggcccttgaacctgggcagccttgcaatctgctttggccaataggatgcagcaaaaacgatgcttcagttccaagcaaggctctgaagtccttgcagtcttccaatttctctcttggacccccacccagccattctgtgaacaaggccaggctaagctaatgtggcccagtcatccccattgtcccagcccagagccagccaaatatgagacatgggagcaaggctaccctagaccagccaaccccaagccaacccaccagctgaccacggacgcataaacaagcccagccaagatgacccaaacctggccagaccagacctatagcctcatgagctataataaatgcttactgtataagccctgagctttgaggtggtttgttacacaccaattgctaaccaatacacctggggatcttatctacatctcccaacaactctgggatcttcagagaaattaaacaatggcttttcctaatcaccctaagtttataccatctttaagtgacagaaaagatttgaactcaaatctatatgagaagaaaatgctattttctcaatcacataggactttcgaaggcttcacctggcttctccactctgccatttttagattgccaaaaatcaagcaacacaaagtacgtaagttctcacgagagtatatattcacttatatgaagtatatacacgagagtgtatgatttcacttatatgaagttctagaagctctagaagaggcaaggccaataaatagtgaaaaagaagtagatcactggcctggaaacagggaagtggttggactgcccagaggcatgaggggactggtgggggcgatggcaatgttatctattgcgatcggagtggtagtcacctaggcatgcatatttgtcaaagtcatctctactctttaaatgagtgcatttttattatgtaaaaattataccttcatgaagttgactttcaaaagttggaaaaaaaataaaagcttaagaacactataccatctttttaaaattaaagagaaaaaaattcaaaatgttagcagtgcttccaatctcccagtgcttatttctctcccagagcggtcttgcgaggaggtcgtgagaagagtcctcctcccaccgccatttctgtggccgggtggtcccaccaaaggcagctcagtgactctcctggctggtctgacccaggccagcctcgcagacccagtggtagggcctctggcagacgtcgtcattccacctgccgtctggatggaagtgagcacagtcctcgcctccacccagcccgtgcccctgccagtcgtctggctggcctggcttccagttcctgagaggaaaagacaacagcaagctaggaagggtagatggagtagaattcagttcaggggaggagaggctgccagtcagatccctgggggaaacgctgacggaggacattggcacagaaagccagggtgcactcactggaagccggtcgcatagtctgttccatccacccacttccaggctccttcagggtcactgaggcccatccaggtgtatgcggagcctagatatttctggacaaaattctgcggtgacagaagggcagtggtgacttcttcccatcccagccaactccttaaactagtgattctcaactttagctcttcgttaaatcaactgaggagtttggagatgtttctctggatgctcaggcctattaaatctctgagggtgtggcacagatgacagtcattctggaagctcccagatgattccaatgtgcggccaagcttaagaaccatttccctaaatgggacatgtcttaggaactgagtaccagaagccctcacctgctcctccctggagttgatgaccaccaggtgggcgttcttcagctggcagtacttctcagcctcggcccaggacatcccagagtgagagaaccagtagcagctgtcttggtgctccacccagttgacagggcagcaggtcccttcagtggaggctgattggggagaaataggatagggtggagaggctgaggctctgcccagtgggccatgggcagaaaagtagggccaggtactccccataccttcctcaccattgttgttgagagtagccacctggcaggtcagtttcttcaggtcttgcaccagctgctggactcgcaggagcatttcagaatgaactgggacacacacagatgggcagtggggacagtggcctaggtgtgccttctgcgtagtgtgttcctggagctcagatacccctgcacagggccaagccagggaatgttccttcccgcccccacccaccccctacatcatggccaggtacagccatcaaatctgctttggattcctctgcccctgtttctccagcctgctctccagagaaagcatgctgcctttctttctttctttcttttttttttttttttttttgagacggagtttcactcttgctgcccaggctggagtgcaatggcgcgatctcggctcacggctacctccgcctcccgtgttcaagcaattctcctgcctcagcctccctagtagctgagattacaggcgcccaccaccacacccagctattttttgtattttttttagtagagacggggtttcaccatgtcgatcaggctgctctcgaactcctgacctcgtgatccacccgcctcggcctcccaaactgctgggattacaggcgtgaaccactgcgcccggcctgcatgctgcctttcaagctgctggctgaaggggagggcagttcagcaccaggagtctgttcccacctccactgtgtctgagcgcctagccccccacacccatactcggagggtctctcacctgcctgccgttcctgcttgaaaccctccacctcagctttcagagatgctatcgtttcttccaagctgctgcctggaggacacggagacttggcttaggggtcaacttcctcctccctggcctggccccagcccagagccccatccaaaccagactcaccctgggaagtcagtgcctggatctccgccacagtgtttgaggtgaagttgctaaaatctgttctcagggtcaccaggtccctctgaaatttggaatctaaacaggtggatgggaaggtcagtgctgggattcatcaggtcctctgtaccagcaccgagcagggccctccataagcattgccttattgggtcctcacggcaacccagtggggcaggcactattattgttcaatattgccgatgaggaaactaagcctcagagaggtgaagtaatttgagtacataacccaactactcagtgacaaagccagcagccatcctgactatgggtccgtcaactctctccatcactacccccaccaccgtccccatcaatcactccatcagtgcccccccaccattcccatcaatcactccatcagtgcccccatcaccattcccatcaatcactccatcagtgctccgaccactgttctcatcaatcactccatcagtgccccccactattcccatcagtcaccccatcagtgctcccatcaccattcccatcgatcactgcatcagtgccccccaccattcccaacaatcactccatcagtgacccccaccaccattcccatcaatcaccccatcagtgaccccccaccgttcctatcaatcactccatcagtgcccccccaccattcccatcaatgactccatcagtgacccccaaccattcccatcaatcactccatcaatgccccccaccattcccataaatcactccgtctgtgcccccaccaccgtccccatcaatcactccatcagtgcccccctaccgttaccatcaatcactccatcagtgccctctcctccattcccatcaatcactccatcagtgccccatcagtgcttcagtggctctgttgtgacccccatgactgttggtagcactgccctcaccatgccccattgttatctccacagctgcccccaacactgtgccctgcattgctcctactgtggacctcaccatcgccccaccactgccctactgtagcaccccattatttatcttctaccccattatttctctcttccctgtccacccctgtgaccctcactttggaatccaaccacacagatgatgaccagcagcaggaggccgaggcccagggacagcaggagatggcagggcccagagcagagacgctgcaggagggactggagaggaagtggccctgcaagaggagagagtgtcaggatgaggagggtccagacaccggagacgggagaaggagagggcccagggagctgtctagtgaggagggctgggcacaggggactccaggggagggttggacaaggaggattttggggtgggggatgcccaggcctttgacttcagggaccagcacaagtcctcagtcacacaggcccctcacacccctggggacccacgtgatagcgatatgaggggtcccatggtcagagctgggggcaggggcaggaggacacagggagagctgggggcagccagcccttcatgggcttatgctcacctacctgctggacaatcaggttcacaaatgagtttccttccaaacccaactacttatctttccctccaccaatgcgcagctctcatccccaccccacagagcatcagaagctgggtccactgtgatcctccctgtcccagtctttctagagaccttgcatcctcttcacactaggcccgtcagaggctggggcctgacctcctcagagttaggacccaccagtgcgcgtggtggaggtacagaaatgataggagaaatccttctaaacatataaagagggcattttaggagagtttcccctttcctcttaccatttttaaacccctggactttcaccttattctccaagtactggaagttttcatacgtccttgtcatgcttgggccaacacggctctgaggttgtcacagctgaaatggaggcagggccggcgcccagtctggggtggagctggggaataggaggttgggactaagttggagccaagggcagggctgacgttgagttgggagatgaggctcaggttgagaatgagcccagggttaagacggaaatgagcctgggtttgcagtcgagttagaattggggtcgagttgagtttgggagtgaaactggagggtaacgttggagctaaacgcattgctaggactacccagtgggccagttaatcaggcaggactggaggttgtatctcatgctaggattggggtcagtatgcacgttggagccatggatggaattggggttaactttggtggtgaatttggaaacagaatagagtcgaggttcaattttggctttgggctggtgttaaaattcaagttgattctggggttggggttgaagtaggagctgggtggggggcgacaggtgcggtggctcacgcctataaatcccagcactttgggagaccgaagcagacagatcactttaggtcaggagtttgagaccggcctggccaacatggtgaaaccccatctctactaaaaatacaaaaattagctgggtgtggtggtgtgcgcctgtaatcccagctacttgggaggctgaggcaggagaatcacttgaacccaggaggcagaggtggcagtgagccgaggttgtgccgttgcactccagcctggacgacacagtgagactcagtctcaaaaaaaaagaaaatgtagaagctggggttagtattgggattagggcatggctgggctgagatgaagataaggctggaaatgggccaccaatgaggctgagtctgagtcttagtttatttttatttttatttatttattttttgagatggaatttcgttcttgtcgcccaggctgttgtgcaacgaggccgtctcggctcactgcaacctctgcctcctgggttcacaagattctcctgcctcagctcccggagtcttagtttatgacaggggattgtggctgccgtaacccaatctagaatccagtgaagggaacagagtctcaaatctccacgtagtaattaaaccccacactgccgccttatatttattttcatttagtcccacccaagacccaaagtccccctctccctgcttcctctgacatcccctgtcccctgggtctcaccggcaccggcagcaccattacctgtgggaggtctggagggtgtgattcccacgttggttgtgctgcaaggaccagaggtgggacgtcactcagagttgggagcgctgtgtcctggagagctggggtagaggtgactggagtcctgctggtcttgggtctgaaatcccaggagccctatcatctgggacatcccatctcctcaactttagacagtaaatgagaatgaacagggattagaacacacagagaccatgtgtgggtggggagagttgggtttgaggccagctctgttctcctcctccaggccatgcctacttcctttcctcttctcggagcttcctcatttttaccatctgggagcagggctggatcagaggtacaatctgctgttgctcctctaccctacacttcctttcacttcctgcctctacatttcccagaattgttgggtctccatcatcgcacctctgatcctagagaagcccagtctgttctcttgctcaatcctggcctgagtccctggcatcagcatcctctgggtcccagtcattcggctgctcagctgtggcctcgctcgcctcactccactcggaaggagggaagggggtgccagagaatagaacttcttggccctaataggacgggagaagccaaggaaaagagcaaattttattgagtaatctgtgataggattatgccagacatttaccttccacaaccattccccccaagcacctggggaggcattttggatgacggactaaaggctcagagcccaagatcactcacagcttgtaaggagacagtttggcaccctgctctggctctcagcacaggcgctgtcttcatgaacaggattccatttcatcccatgatccctgctcaacccctaagggagctgccctgaatccacgcgcacatccctttcagtaggaaggaaactgagtatcttacaaggtggagaaggagaagaaatacattttaggttatattttgtatgtacatggggttgtgttctgctatgtgctttttttttttttttttggagttaacaagctatcaggaacatttctccacatcagtttataaaatgtacttgatctacctgcacctcatttcatcataggcaccgtaatttatttatttagcatttctctattgacagaaataaatcagaaatttaagttgtttctttttcttttcttttttattttatttatttatttatttttttgagacagagtctcactctgttgcccaggctggagtgcagtgacacaatctcggctactgcatctcctgggtttaagcgattctcctgcctcagcctcccgagtagccgagattacaggtcccgccaccacacccagctaattcttgtatttttagtagagaggggtttcaccatattggccaggctggtcttgacctcctgacctcacatgatctgcccgcctcagcctcccaaagtgcagggattacaggcgcgagccaccgcacccggccaggtcgttgccagttttgtttttatttggtattcggtattttgattagtatatgtcgcaggttcggtttttggaagccaaggttgaggctgaatttggggtacaagctatttattagggattagcacttcgaaaaggaaagtggatgaaatggtgctgggcagagggagaagcccagcactttggagagcttcaaccaaaccaacagggagctctgggttcaaacaatgccacccccgggagctgtccagcattggactgccacagggtcctgtagagcaccagctccttcggtcactggcagtcagccctgacatgggtgtgacctcaggaagcagctgtctgcaggttacactccccacagtgggtcaccacatccttcctagaagggggacctgggtagctctctgtgtgtctaccacagtcttgcagtgtattcacatattaatttggagataatcaacattttgacattgttgaatcttccatgaaaagaacatgatatttctccattcactaacttttttttttcagtctggttcagtgggtttgaagcttctttttttttttttagttctgggatacatgtgcagaatgtgcaggtttgttacgtaggtatacgtgtgccatggtggtttgctgcacctatcaacccatcacctaggttttaaggcccgcatacattaggtatttgtcctaatgctctccctccccttgccgcccaccccctgacagaccctggtgtgtgatgttcccctccctgtatccatgtgttctcattgttcagctcccggttatgagtgagaacatgcggtgtttggtgttctgttcctgtgttactttgctgagaatgatggtttccagcttcatctatgtccctgcaaaggacatgaactcattcttttttatggctgcatagtattccatggtgtatatgtgccacaatttccttatccagtctatcattgatgggcatttgggttggttccaagtctttcctattgtaaatagttctgcaataaacatacgtccaatcactcttatacacatttattcatccatttgagtacttattgagtctacggcatgccaagcactttccttcccaagaggcagagttcaggagttcaaaagtaaacagacaaaaaagtcctgccttcatagagcttaccttctagtgggtcaccaataaacaaaataaatgagtaaaatatacataagccacatggcaatagtgctttgcggaaaaagagcagggatatgagatagggttgatttttaatgtccctcaagaatagggcatgtattagtccattctcacattgctctaaataaatacctgagactcggtaatttatcaaggaaaggggtttaattgcttcgtagttctgcaggctgtgcaggaagcatggtgccggcctctgctcagtttctggggaggcctcaggaaacttatgatcatggtggaagatgaagggggagcaggtgcctcacatggtaagaacaggagcaagagaaaagacaggggatcagattttaaatgaccagatctcacggctgtgcgcagtggctcacgcctgtaatcccagcactttggatggccaaggcgggcggatcatgaggtcaggagatcgagaccatcctggctaacacagtgaaaccctgtctctactaaaaatacaaaaaattagccaggcggggtagcgggcacctgtagtcccagctactggggaggctgaggcaggagaatggcatgaacccagaaggcggagcttgcagtgagccgagatcgcgccactgcactccagcctgggcaacagagcaagactccatcaaaaaaaaaaaaaaaaaaaaaaagaccagatctcacgagaactccctcactatcatgagaacagcaccaaggagatggtgctaaccattcatgagaaatccatcccataatccaatcacctcctaccaggccccacctccaacatcggggattacaattcaagatgagatttgggcggggacacagatccaaaccataccagagtgtcaagaaaggcctcactgggaaggtgatatctgagcaaagtttgaaggaggtaaggaagcaagtcacaaggggctctggcaggaagagtgatgcagggagcgggcagagcaagtgcaaaggccctgaggtgggagaacgtctggtgtgtatgaggatcatccatttgacagacttgccagagattttatagagaagtgagtcagggaggagaagagtagatgagcgatgggggaaaatgtgagccttgttggctgttattaaggacttgtttttactctgagtcagagatgcagactttgaaggggttggagcagaggaatgacataacctgacatatgttaactgtaacggtgtggcttttgtgttgtgaatttgatgaaacaagctggaaacagagagtctaggtaagaagctgctgtcatatccaggtgagaaatgaggtggtcagaagtgttgtgattctggatatattgtgaaggtagagcagacagaatttcgctgataaattgcttgcgggtttcatgaaaaaaatagttcttctagtccccaaaataaactaaacattgagcattttctataaattgctgactccctagaaaaacaactctaaccctgatgtttgcaatgctgacgcctgggtaggtcatgacctttcgtgcatatgaaaatcatgtgagaaaagcgctgggttttgccatcatgagtagactgataaaaacgtgctcacaatggtaatcttggagaatttccctttcaatacttgttgtggttttagtttggcaagcctgtccttctaaagcctgatttatttgccaggtcttggcaagcaatcttcttttctttcctaaatgcttctgtccctgagacccctttcactgttgacaatgatcgtttccctcttccgccacattttccgcaaattcttaccctctcctagaaccgctactggtcaggactttttttttttttttttaagctaggaacaagagaaagcacgctcgtgccaccagttctccatgagattcttccagaccatacagaaagacaagtgattggaacatatgaaggttgaaagggaaagagaactgtcattattggtaaatgacatgattgtctactttaaaaatccaagagaaacagcccctcctgggctcaagtgatcctcccgcctcagcctcctgaatagctaggactacaggcatgcaccaccacactagttaaacattttactgtgtagagaacagatctcactattgttccccagcctagtctcaaactcctggcctcaagcaatcctcccacctcagcctcccaaggtgctgggattacaggtgtgagccatcatgcccagcctgtgttctcttcgataatttttatagtttcagctttgatgtgtgtctatgatcattatgaattagattttttcatatatatacagttgttccagcaccatttattgaaaatacttttctccatttaattatttctacctatatagttgatagaattcatcagagacgtcatctgaaactggatattttctttgttgaaagattttaaattgtgaatttatttgaattcaggaaagtctgttcagatttcctattgcgtttttagttttggtaatgtgtatctttcaagtaatttttccattttattctatttatgggcaaatttattggcaaaaagttgttcatattatccttttgatgtatgtaggagctgtatttatattttctttcttttttttttttttgagatggagtctcacttgtcgcccaggctggaatgcagtggcgccatctcggctcactgcaagctctgcctcccgggttcacgccattctcctgcctcagcctcccgagtagctgggactataggcgcccgccgccacgcctggctaattttttttttttgtatttttagtagagacagggtttcaccatgttagccaggatggtctcgatctcctgaccttgtgatctgcccgcttcggccccccaaagtgctgggattacaggcgtgagccactgcgcccggccttatattttctttcattcttaacactggcaatttgggggtttgtttgtttgtttttgagacagagtctcactctgttgcccaggctggagtgcagtggcatgatctcggttcatgcagcctctgcctaccagattcaagagattcttgcgcctcagccttccaagtagctgggattacaggcgtgcgccaccatgcccagctaattttcgttttgtttgtttgtttgttttttgagacagagtctcgctcattgcccaggctggagtgcagtggcacgatctcggctcactgcaagctccgcctcccgggttcacgccattctcctgcctcagcctcccgagtagctgggactacaggcgcccgccaccattttgtatttttagtagagacggagtttcaccgtgttagccaggatggtctcgatctcctgaccacgggatccgcctgcttcggcctcccaaagtgctgggattacaggcgtgagccaccacacccggccaattttcgtatttttagtagaaatggggttttactacgttggccaggctggtctcaaactctcagctttaagtgatctgcccaccttggcctcccaaagtgctgagattacaggaatgagcactgtacctggccaacactggcaatttatgtcttcacactttttttctatcaattttatcaattttattgatcttttcagaaacagtttctggtataattaattttccttgtttgtttatttcattgacttccgctcttattttcttcatgtttgtacattggatataaacatctttttctggtctcttaaggtagaagcttagattctttgatttttggccctttctctttttctagtataagcaatgaatgttgtaaaatttcatctaagcattgttttgaatgcagcatcttctcattttctttttgttgttgttgttgttgagacggagtctcgctctgtcgcccaggctggagtgcagtggcagcgctatcttggctcactgcaagctccacctcccgggttcactccattctcctgcctcagcctcccaagtagctgggactaaaggtgcccgccaccatgcccggctaattttttgtatttttagtagagacgggatttcactgtgttagccaggatggtctcgatctcctgacctcgtgatccacctgcctcggcctcccaaagtgctgggattacaggcgtgagccaccgcgcagggccctcattttcattcagttaaaaatatcttctaatttatggtttcttttttgatccataggtgattcagaggtatattgtttaattccaaaatatttggatttttttttccactttttttgttattgatttaatatatttaatatttaattccattttgatcttagaaaatgtattatttttagctttaaacatttattgagggcttccagttccaggtaaaatgatggaaacacattccatcctttctgtcccattgaatacaactctaaaatgtgggtagaatatatgcatcagcttattgaaaaccctgaaaaatgaattgtaacatgtttgtcatagaaaaacaccagaatttgaagtatcactgaactggcagcaagtttaccattttttcttctatggttccccaacctgagttcagcatggccaaaattctggaaatgaacactgtggcatggatagagggagctccaggaaatgctttctaggcctggcttgaggaactcctaacactcacaggaaatacagaaatctcctgtggacttttcccccctttcttttctttttctttttttcttttttttttttttttttttttttttgtgacgcagtcttgctctgtccaggcttgagtgcagtggcgggatctccgctcactgcaaccttcgcctcccaggttcaagcgattgtcctgcctcagcctcctgagaagctgagactacaagcgcatgccaccacacccagctaattcttgtgtttttagtagagtcagggtttcaccatgttggccaggatggtcttgatctcctgaccttgtgatccgcccacctcggcctcccaaagtactgggattacaggtgtgagccaccacgcccagcctccccctttcttttcttgtgccatgtccatggtcaatctcatggcagcaatggcagcactgggatgactagggccagaagaggccaaaactttaagggagaagaaccttcctctctgtgtaagggagctgcagttccaataaattgagaatgcctttgtgttgttattgtttttttttttctctgtgcccttcctccatttagacgagtttctcacgatagagccaaaaagaagagctgcaggaaaccagagagtaccagggagaccatgaagatatgtatgcttgggaaagctacactgtaaagctgttgatgagctccagggctgaccactgagccgtgattgtaaggatctcaccctaattagcatcctaaagactttcagatctaaactcacgaacaaactaccgctcatgccgcacactaaccagagtggcacacagtcatgacagacctaaagagatctaaaaaaaaaaacagaagagaacataacatatcaaaaggctttagaactgaactgacattggaaccataccctacagaggtgtgttggaacacacagcctcaacctaaccaggtcaattgcctgctaaacaaaaatatcaactgtggggaaaagaaagagagatcagactgttactgtgcatacgtagaaagaagtagacataagaaactccattttgttctgtactaagagaaattcttctgccttgagatgctgttaatctgtaaccctagccccaaccctgtgcttgtagagacatgtgctgtgttgactcaaggtttaacggatttagggctgtgcaggatgtgctctgttaaaaatgtgtttgcaggcagtgtgcttggtaaaagtcatcgccattctctaatcttgagtacccagggacacagtgcactgcggaaggctgcagggacctctgcccaggaaagccaggtattgtccaaggtttctccccatgtgatagcctgagatacagcctcatgggaagggaaagatcccagcccaaaacccgtaaagggtctgtgctgaggaggattagtgaaagaggaaggcctctttgcagttgagataagaggaaggcatctgtctcctgctcatccctggaaatggaatgtctcggtgtaaaacccgatcgtatgttctatttactgcgataggagaaaaccgccttatggctggaggtgagacatgctggcggcaatactgctctttaatgcactgagatgtttgtgtaaagtcaaacataaatctggcctatgtgcacatcaaggcacagcacctttccttaaacttatttatgacacagagatctttgctcacgttttcctgctgaccctctccccaccattaccctatagtcctgccacatccccctctccgagatggtagagatagtgatcaataaatacggagggagccgggcgcggtggctcacgcctgtaatcccagcactttgggaggctgaggcgggcagatcacgagatcaggagatcgagaccatcctgaacacggtgaaaccccgtctctactaaaaatacaaaaaattagctgggcgaggtggtgggtgcctgtagtcccagctactgtggaggttgaggcaggaaaatggcgtgaaccccggggggcggagcctgcagtgagccgagatcgcgccactgtactccagcctgggcgacagcgagactccatctcaaaaataaaataaaataaaatgaaataaaataaaatagctactgagggaactcagagaccagtgccggcacgggtcctctgtatgctgagcactggtcccctgggcccactgttctttctctatactttgtctctgtgtcttatttcttttctcagtctctcatcccacctgacgagaaacacccacaggtgtggaggggctggccccttcaatcaacagtctctatagaatttaaacaagacctagaatctcataacttaacatttaaattgttcagaataggctgggcccagtggttcatgcatgtaattccagcactttgagaggccaaggcaggtgagtcacctgaggtcaggagttcaagaccagcctggccagcatggtgaaacctcgtctctactaaaaatacaaaagttagctgggcatggtggcacacgcctgtaatcccagctactcgggaggctgaggttgcagtgagccaagatcgcaccattgcactccagcctgggcgacagagcaagactccatctcaaaaataaaacaaaataaaataaaatgtccagaatacaatccaaaatcatttgacatataaagaacaacaaaaagtttgacctgatggtaaaaggcagtgccaagatgacaacgatgttgaaattctctgacagactttaaatcagatattataagaatgcttgagtgagcaattgataacactcttgaaacaaatgttaaaatagaaagccttggtaaagaaatagaggctataaagaagaaccaaataaaaacattaaaactggccaggtgcagtggctcatgcctacaatcctggcacttttggagcccacggcaggagagtcacttgaggccatgagttcaacaccagcctgggcaacattgtgagactctgtctctacaaaaaaaaaaattaaaaattagctgggcgtggtgtcatgcacctgtagtcccagctattgagaaggctaaggtgggaggattgcttgaggccaggaggtcaaggctgcagtgagccatgatcatgccactgcactctagcctggtcaacatagcaagaccctatctcaaaaaaattaaataaatagaatttttaaaattaaaaaaataaaaatgttaaaattgaaaggcacaataattgaaacaaaaaactcaatggttgaacctagagcagaatggaataacaaaggagtcagtgtatttgaagatacatccatagacactacccaagctgaggaacagagagaaaaaaaaaataggaaaaaaatagcagagccttagggaccgactgtcgtccaataagaaaatatctttttttttttttttctgagacagtctcacttagtcgccccagctggagtacagtggtgtgatcttggctcactgtagcctccacctcccaggttccagagattatcctgccttagcctcccaagtagctgggattacaggcatgctgatatttgtatttttagtagagacagggtttcaccatgttggccaggctggtctcaaactcctgacctcaagtgatccacccacctcagcctcccaaagtgttgggattacaggcgtgagctatcacacctggccacttagaaagaaatttattataaaatgcttacgttaaaaagaagaaagttctcttaagtcaataatctaagttcccaccttacaaaattagaaaaagaaacacaaaagaaactccaaacaagcaaaagaaaggaaataacaaagataagagcagatatcaatgaagctgaaaacagaaaaacagtagagaaaatcaatgaaaccaaaatctggttacttgaaaagatcaatacaattgataaacctctagcaaaactgatgaagagggaaaaaagcagacactacaaaatactatttgtagggtccagccctttggggcttagcgggtgttctccccgtgtgcggagacgagagattgtaataaataaagacacaagacaaagagataaagagaaagcagctgggcccgggggaccactaccatcaagacgcggagaccggtagtggccccgaacggctggttgcgctgatatttactgcatacaagacaagggggcaggggaaggagggtgaatcttctaagtgattgacaagatgcagcaagtcacgtgatcacaggacagggggcccttcccttttaggtagccgaagtagagagagaaggcagcatacgtcagcgttttcttctatgcacttataagaaagatcaaagactttagactttcactatttcttctaccgctctctactacgaacttcaaagaggaaccaggagtacgggaggacatgaaagtggacaaggagcgtgagcattgaagcacagccccacagggaggggtttaggcctctggatgactgcggggaggcctggataatatccagccttccacaagaagctgatggagcagagtgttccctgactcctccaaggaaaggagactccctttcgcgatctgctaagtaacgggtgtcttcccaggcactagcgttaccgcttgaccaaggagccctcaagcggcccttatgcgagcgtgacagaaggttcacctcttgccttctaggtcacttctcacaatgtcccttcagcacctgaccctatacctgccggttattcctaggttatattagtaatgcaacaagcagtaatattaaaagctaatgattaataatgtttataataatgattgataattgtccatgatcatctctatatctaatttgtattatgactattcttattctaactattttttttattatactgaaacagtttgtgccttcagtctcttgcctcggcacctaggtactctttcgcccacaactattatcaagaataaaataggggatttcactacagaccctgaaaagattagaaggataataaaggaccattatgattacgcacaaaatttcaacagtttaaacgaaatggaacaatgactcaaaaaccactaactaccaaaatttacccaagattaaataaataaactgaatagggcctggcgcagtggctcacgcctgtaatcccagcactttgggaggctgaggcgggaggatcacaatgtcaggagatcgagaccatcctggctaataggagaccccatctctactaaaaatacaaaaaattagctgggcatggtggcaggcgcttgtaatcccagctactcgggaggctgaggcaggggaatcgcttgaacccaggaggtggaggttgcagtgagccaagatcacgccactgcactccagcctgggcgacagagcaagactctgtctcaaataaataaataaataaataaataaataaataaataaatcgttctagaactataaagaaattgattttagccaggcatgatggctcacacctgtaatcccagcactttgggaggccgaagcgggaggatcacttgagctcaggagtttgagaccagcctgggcaacatggcaaaactccatcactacgaaacaatacaaaaatgagccgggtgtggtgggttgcacctgtggtcccagctactctggaggctgaggtggaaaggtgaactcagctgtacacccaccagctgtacactcactgcaggaggccgaggctgcagtgagccatcattgcaccattgactccagcctaggcgacagaggcactgtctcaaagtaaaaaaaaaaaaaaaaaaaaaaaaaaaaaaaaaaaagaaattgaattcatagtttaaaaccttccaaaacagaaatcaccagcccagatggcttaactagcgaattctaccacacatttaaagatgaagtaacaccaattctacgcaatctcttccagaaaatagaagagggaccacttcccaactcattttcttaggctagcatttgctctgctcctgaaagcagacaaaggtaatacaagtaaagaaaactacagaccgatatctctcatgaacatagacataaaagtctcaacaaaatattagcaattggaaactagcaatacatgaaaggataatatactataactaagtagtgcttatctcaggcctgaaagactggttcaatattcggaagtcaattaatataatccagcatattaacagtctaagaagaaaagcaacaaaattgtatccactcatggagagaaggcattagacaaaattcaatatccatttatgatttttttaaatactcttagtacactaggaatagaaggaaagttccccaatctgataaagggcatcatctactaatatgtcattcattgttattcaatagactttttttggatttttcttcctatacattcagctgtcaaagacagttttaatttcaggtctcaaaagtccagcccagactaaagcaaaccttttttttttttttttttttttttgagatggagcctcgctctgtcgcccaggctggagtgcagtggcgcgatctcggctctgcaacctccgcctcccaggttcaggcaattctgcctcagcctcccgagtagctgggactacagaaacacaccaccacaccctgctaattttctgtatttttagtagagacgggttttcaccatgttagccaggatggtctcaatctcccgacctcatgatccgcctgcctcggcctcccaaagtgctgggattacaggcgtgagtcaccacgccggccgatttttttcttaacactcagcaccactgtctgtctgtcggaggactgccttcacgccgctacagaaggcaggaagtcacagaatggatgatagcccgtgactgttgcgttctgaggtgtgagtactccagctcccctgttcctaatgggggcaactctgagatgtgacctacactgtttccaatgctccccagtgggattgagatagttacaccaccaccaacaatgcaaggcttgccttcgagcacttcctgatgaattcctttcccaagaaccaagctctcacagcgagcttcaattgcatgcacgcttgccttccttcccttcctcttcctgattccccattctcctgtccacttctcctaagagcactttctagtgaatcactttcataagaatcatctcggggactgactgagagaagccaggactggagtcctgggaggttctgttcctcctttctgtttcttttcctcttctcagtactcctcaagggctgggtcaagggagagaagaatgcaaggaaaccagcgctgccatctgtgctagtgtggcagtcgaggaggtcttcacagcaagcatccgacactggctttcatgaggtctattgggggtgtccagagacccccgcaggatcttttgtgacccagccgttcaccaccagttcctgcccagatgaaaactgtacacccaccgcctcttacagcctcgctctgccatgcagtcctcttgggcagggtccttcctagctggctcaagcctgacatctatagagtcgcctcggctcacgggttctctgacattatgctgccagactaccaagtgcagcctgattgactggtggacggggcaactccagcccagatgtttgtcttcagacttctcctgtcaagaagcagagatgagtctgtttcttcacaactgccacaaaactcctgaggacacagccatagcctccactaaaactcttcttgcccctctcacgtagcattccacagtggtcccagtggtgtctgcatcttataaggctaccatcaggcctggcagggagatgctcgtgttatcccctggcagacaaccactgtctctacaaacagttcccttgcaactctattatctcactgatagaggtttaaagaagcattccccttcctgtggagggaaaaagtgttgaatcccttgctacacatctaagaattcccttgaggccgggcgcggtggctcacgcctgtaatcccagcactttgggaggccgaggcaggtggatcacttgaggtcaggagttcgagaccagcgtggccaacatggtgaaaccctgtctgtactaaaaacacaaaaaggagccaggcatgatggcgggtgcccgtaatcccagctactcaggaggcaaaggtaggagaatcacttgaacccaagaggtggaggttgcagtgagccgagatcgcgctactgcactccagcctgggtgacagagcaagactccatctcaaaaaataaaaaaacaaaaaagaattgctttgaaacaatccccttaaatctccattcatcttttgcgtagcctgggaagagtgatggtgattatgttgcctctcttagttagtcctgcctacatgcatccagcttttctctgttttaaatgggcacttaccaatgatcattctcaactttgggaatctagccaaatctctataacaacaggaaaagtgtcatttaacctccctatttcttgtggtcatgtcacttttctcagttccttaattgggcttgccaagatgttgtttaccatattagtctttttggaaaggggtttttgttaagaggataacatgacaagctacagacttggagagaatatttgcaaaccacctatccaacaaagggttagtacctagaatatataatgaattatcaaaacttgacagtgaaaaaacaaacaatctcaattagaaaatgggcagaaacctgggcacagtggctcacgcctgtaatcccagcacgttgggaggtcgaggcaggcggatcacctgaagtcaggagttcgagaccagcctggccaacatagcaaaccccatctgtactaaaatacaaaaattagccgggcgtggtggcgagcacctgtaatcccagctactcgggaggctgaggcaggagaaacacttgaccctgggaggtagaggttgtggtgagccgagatcgcgccactgcactccagcctgggtgacaaagcgagactttgtctcaaaaaaaaagaaagaaagaaagaaaatgggcagacgacatgaagagatgttttaccaaagaggataagcagatggaaaataagcacatgaacgaatgtacaacctcattagctgccacagaaacgcaaattagaaccacagtaatgtatcactatatatctatccaaagagctaaaactttaaaatactgacaacaaccagatacaggtgaggaagtgggcaaactggatcatttatacattgctggtgggaatataaaatggtacaaccactctggaaaacagtttggcagtttcttttaaaagtaatcatgcacccactatatgacccagaaattgcactcaggcatttctcccagagaaataaaaatgtgtgttcacacaaaaacttgcacatgaatattcatagcagccgtatttgcaacagccaaagactggaaacaacccagatgtccttcaatgagtaaatggctaaacgaactgtggtacgtctatctataccatagaatagcgctcagcaacagaaagaaatgaactgttgacgcatgcaacaacttgtaaaaatctcgagggaattacgttgagtttgaaagtcaattccatggccgggtccagcggctcatgcctgtaatcccagcactttgggaggccgaggcaggtggatcacgaggtcaggagttcaagaccagcctgtccaagatggtgaaaccccatctctactaaaaacacaaaaattagccaggcgtggtggtgggtgactgtaatcccagctattcaggaggctgaggcagagaattgtttgaacccgggaggtggaggttgcagtgagccaacatcgtgccactgcactccagcctgggcgacaagagcaaggccaatttatcacttttagagaggcgatgtgatcattgctgaaccatcacccaacatttctagtgggcgggaaagccccctcctgcccactcatgcctgtctaactacctgtaacaaccctggaaacccagcattctgggaggccgaggcagatggatcgcttgagcacaggagtttgagaccaggaggctcaaactggtcttgaaccagaaggccttctggtcttgaacccagtttagtgagaccctatcattataaaaaatttaaaaattagccaggcgtggtggtatgcacctatagtcccagttacttgggaggctgaagtgggaggatcacttgagcccaggtgtttgaggctgcagagagccatgatcatgccactgcactccagcctgggtgacagagcgagactttgtctcaaaaaaaaaaaaaaaatatatatatatatatatgtgtgtgtgtgtgtgtgtatacacatatatatgtatatgtacacatacaatttatatatatatgtatatatagcattttctagattctgtgatgtttctggtagctctctgcttttgaaatttgtgactttttaaatttaaataaatggtaatttttatgcttaattttatatccataattttgtaattgttcttacagagggctccccaaaattgtgtacacctcaggccccataaaacttggaatcacttctctggctctaggaaaaagtacaccaagtacaactaaaatactgattatacgactggtttgcacgtctggaaaaattatattgtcaagctttttacagttcaggaagactcagcaataagttaaaagaatatgaggcaaatttttttaatggaatactgactactttcagaagaaatgagagttgtgcaagaaagggaatgtaatcagattatagtagttgactcagcagtaaccatattgacacagatacaactgatacaaattttaaagtagtatttaaatataaattgtagactacattggaagattttacctcgtttacatgatagcgactaaataatgtctacaactcatacgaagatgaaatatcagtttgtgtgtcttacttagaactgcagatgtcagtactagaagaaacagctagaatcactgaaagcagtttctccaggcagcaagaggagctaaagggggcaggtcaagtaacctagagccctgtaaaacttctagttttatagactttatacttctagttttatagactttataaaatttctacttttctataaaaattctagtcctataaaactttagagtgtattattacttccataatttattttttgagaaaagatctcgctgtcttacccaggctgcagtgtagtgacacagtcacagctcactgcagcttcaatttcctgggctcaaactatcccctcatctcagcctcccaagtagctgggactgcagggatgcaccaccacatccagctggggtgtgtgtgtgtgtgtgtgcatgttgtacagactgggtttcgccatattgcccaggctagtctcaaactcctgagctcaggcgacccaccacctcagcctctcaaaatgctaagattataggcatgagccattgcacccagcctattttcacggttttttaaatttaatcccaatcgtgtacattttgaaggggcaatcctagaaaatttttcaactgaaaagtgggaagtcttgacctatcccaagcttatgagcaaaaaaattactttgaaacattctatgtgaaaacaaagaaacaaaagtggtaactacttgccccctacagagaatgattacataatgcatggtacatccctactttggaattctctacagctgctaaatccaaggaggtaaaacctgccaggtaatggcatagattagactggtgtccacgagacactgtgaagcggaacaggcactatgtaatgacataatattgcatctactcatgtacacaggaagggctctggcaggggacacaggaaagagttgactctggggagacggaggaggactgagaggacactcgtgtgcgtgcgtgtgtgtgtgtcatttaaaacatttttttactaatagaatgtattacttctgtactttaaaaatttaaaaatatggggccgggccccgtggctcatgcctataatcccagcactttggaaggcagaggcgggcggatcacccgaggtcaggagttcaagatcagcctggccaacatggcgaaacgctgtttctactaaaaatacaaaaattagctgggtgtggtggcgcatgcctgtaatcccagctactcgggaggctgaggcagaagaatcgcttgaacccgggaggtggaggttgcagtgagccaagaccgcaccattgcactccagcctgggcaacacagcaagactccaacttaaataaataatataaccgctgaatagtctttttaaggtcagtttcagaatgttcttggagcgggaagtttgcccactgtggagattgttggtgacaccctgtgttgaagatatgtctagatccgcttggggtcaaaaagacagagccacggtggtgagaaagtgacttacccatcctcctcctcgtcgtgaccattttccttgaaggctgagagtggagctggggtatgccctgcgacccggtctggggagaacccaaccgcagagaaagatgtttcctttgggagccctggtgtgtccggaattggtgggttcttggtctcactgacttcaagaatgaagccgcggaccctcgcggtgagtgttacagttcttaaaggcggcgtgtctggagtttgttccttctgatgttcagatgtcttcagagtttcttccttctggtaggttcatggtctcactggctcaggagtgaagctgcggaacttcgtggtgagtgttacagctcttaaggcagtgtggacccaaagagtgagcagcagcaagatttattgcaaagagcgaaagaacaaagcttccacagtgtggcaggggacccgagtgggttgccgctgctggctggggcagcctgcttttattctcttatctggcctgattggtgcgtttacaatccctgagctaggcacaaaggttctcgacttcccgaccagagtagctagatacagagtgtcaattggtgcattcacaaaccctgagctagacacagggtgctgattggtgtgtttacaaaccttgagctagatacagagtgccaattggtgcatttacaatcccttagctagacataaaggttcttcaagtccccaccagactcaggagccccgctggcttcaccccatggatcctgcactggggccgcaggtggagctgcctgccagtcccgcgccctgcgcccgcactcctcagcccttgggtggtcgatggcactgagcgcgccctggagcagggggcggcgctggtcggggaggctcgggccgcacaggagcccacggagcgggggtcggggaggctcaggcatggcgggctgcgggtcccaagccctgccccgcgggaaggcagctaaggcgtggcgagaaattgagcacagcagctgctggctcaggtgctaagcccatcactgcccgcggccggtggggcaggccggccactccgagtgcggggtccgccgagtccacgcccacccggaaatcgcgctggcccgcaagcgccgctccctccacacctccctgcaagctgagggagccggctccggccttggccagcccggaaaggggctcccacagtgcagcggcgggatgaagggctcctcaagtgccgccaaagtgggagcccaggcagaggaggcgccgagagcgagcgagggctgtgaggactgccagcacgctgtcacctctcactgggagccaggcggaccctccagccacagcccggccgacccctttcccaccagtgccagccactaagcctgtctgctccaagcccctttcccgtttccctgaccaatgtccctcgggattagggaccaaggagcagctgtctaggatgcgcgccttgcgtcttccatgccctcccctctccctcctctttgcatgctgtttctcagttcccaataaccaggccacacagagattcaagcatttgtttcttctttcctacgccattgaagaggctgacgattataataattacaatgaattacagaaggaggtgggatctcagtcctccagggtcagggactcttaaactacctcctttctctctttgctcagctcttccccatacccctgtctcagtgtttcttcctttcctcaaaatcctcaacagagaagccagagctgggcaggtgtggggtatgggttagccagaggtgtgctggggtcaggccacctcgccggtggcattccgccttttctcacacacccagcggtacacctgcaggcagaagtcatcgttccagcggccatccggctggacttcaacacagtcttcacttccacccagctcgtgcccgtgccaattatctggctgagtgacagcccagttcctaaggaggcaagagaaaactcggactctgccacggtggtgagaaagcgacttacccatcctcctcctcttcatgaccattttccttgaaggccgagagtggagctggggtgtgccctgctacccagtctggggagaacccaaccgcagagaaagatgtttcctatgcccagtcccagcaaccctcacccccagcccagaagagcacagctttggaggggttggagtctggggaggagaggattggggaatttggtccctgagggacgagtcagggtagcttggagtgaaaggccagggggctgtccccagagaaatctaacaaggagatgagggaagaggccacttacttgtagttgtgcctatagtctgtgccatccacccatttccaagagccatcactgtccgtgagacctatccaggtattgaaggggttcgtgtgttgtacaatgaatttctggaaacacaggcaaacaggaaatttctagtctcttgtgcctttctcctccctccatgcaggcatggaactgtggcccctctcagccttccccagcctgatctgccctcaggctgaagcaccagctcccgacaagactgcttcctagctttttcttccgtcactctagctactgttcagtgcacatttgctaggctagacttcgtgctgtctgtgcaaagatgatctcatttaatcctcagaagctctctaagatgggcactgcagtgaccacattttgcagggagttgcagagccagagagccaatcctgtacctgagttagtggccactgtcccctgttcacagccctgggccggtgtcccccttcattcccagcttatggctctacccaagttccggttctctccctgtcttctgcccacagcctcgaactcctgggatcccgaccctggtccctgctcttactgccccccagaccccagacccactgaagatctcagtttcactggcctctcaagtacattggcccctggtagctctcgcttctatgtgtagctgtcatttcctgagatctgtcaggcccgggagcttctaagcttggacccactgcccagggccccattatgatctagctacgtggagtctgacaatcggggcaaaataggaagacaccggggtgtgaggaagcagcccggacagccagttgccaggggcttgggtgaaagtggacttcgagcctgcagatagctccccgggacccacgcgcacccacactcccagcacggtagcccctccaagtggctttctcttacacatacagctgttcctggggacctaggtcccgtggttcggtagggtaggaggggaaggtgtggtcacctggttttgtggagaaagtggagagggatggatccgttgagcaacgtgcacacttaacaattccctttgacagcctggaattttccttccaacagtatttgaaggacaattgcctaattctactctcactctctagaaaaacaactaaggttgcagttattcacctcttccgattgagcatcagaaactggggcatccctaaattctggaatcccacaaataggacaaagtcccatgcatgaaggggcagccctcagaggcaggtgaggctgctccccaaattcagaggagtcaacggagttggagagaaagtgcctggagacaacacacactatgtgctgctacctgctgccagccctccctcccatcaccacgagaaacagaacaactgagcagactacaaattagcagtatccagcccgccgtgttaaagactgagaggaggaatcaaatcatgccagatgatcagagaagacagtccgggagaattcattccccctttcctgggtgaaccataggaaagaaagcactgtgcccattcacaaaagtaatggagaaaatcatcatggaacttatgcccccaaaaagaaagaggaagatgaggcagatgaaaaatgaactgtgatatcaaaaagagaggtgaaaaatagactttgaaaagaagccttgtttcggaatatgaggggatgttggagaacagtttcttttttattattattatactttaagttttagggtacatgtgcacaacgtgcaggtttgttacatatgtatacatgtgccatgttggtgtgctgcacccattaactcgtcatttaacattaggtatatctcctaatgctctccctccccgctcccaagaacagtttctttacatgcttcaaaaattttaaaaagaatgacataaaacatgaaagaagatataaaaaaaaaagagaacatgataaggaaaggaaatgaaaagtttgagctacatactaaaaaaaaaagcccaggtgtggtggctcacgcctgtaatcccagcactatgggaggccaaggcaggtgaatcacctgagatcgggaattggagaccagcctgaccaacacggagaaacctcatctccactaaaaatacaaaattagccaggcgtgttggcgcatgcctgtaatcccagctacttgggaggctgaggcaggagaatcgcttgaacctgggaggcggaggttgtagtgagccaagatcgtgccattgcactccagcctggtcaaaaagagcaaaactctgtcttaaaaaaaaaaaaaaaaaaaaaagccaggcgtagtggctcatgcctgtaatcctagcactttgggaaggccaggcgggaggatcacctgaggtcaggagttcaagaccagcctggccaacatggtgaaaccttgtctctactaaaaatataaatattagccaggcatggtggcaggcacctgtaatcctagctactcgggagactgaggcaggagaattgcttgaaccgggaggcagagcttgcaatgagtcgagatcgtgtcactgcactccagcctgggcgaaagagcaagtctccatttcaaaaaataaaaataaacaaaaaatttcagataaaacacttgaggggccgggcgtggtggctcacacctgtaatcccagcacttcaggaggccaaggcgggcggatcacgaggtcaggagttcaagaccagcctgaccaacatggtgaaaccctgtctctactaaaaaatataaaagttagccaggcacgatggcgggtgcctgtaatctcagctactcgggatactaagacaggagaattgcttgaacctgggaggcagaggttgcagtgagccaagatcgcgccattgcactccagcctgggcgacagagcaagactccatctcaaaaaaaaaaaaaattttttttttttttcagatacaacacttaaggaacctaggaaaggaaagactcagacacatgggaataagaggtatcctggtctcctcacctttcctatggaagttatacaaacttttagttttcaaagccaataattttcagcctattatttaaagttatacaagtaatcactggaataactctaaataaactacatagtttccaaaataccataaagaagaaaacaaaaagaacacctctcacatagcaattgtaagaaaattaagaagcatgtaaagcagaaaaaagaaaggactagggttaaacatatctattagaatgtaaatgagacactcacctattaaaagaaaaggtacttattagatttttaaacatcaaaaacaaaacctgccaggtgcagtttttggattacagtggctcagacacctgtaatcccaatattttgggaggcccaggcgggcgaatcgcttgaggccaggggttcaagaccagcctgggcaacatggcacaacaccatttctactaaaaatgcaaaaaactacccaggtatggtggtgtgcacctgtagtcccagctacttgggaggctgaggtgggagaatccgttgagcccgggaggcacaggttacagtgagctgagatcatgccactgcactccaacctgggcgatagagccagatcttgtatcaaaaacaaaacaaaacaaaaaacctatataggagaaataccttaagcttagctgccctgtgctgcccctcagggaatggtccaggatgaagccaagattaatttaaattagcatttttttttttttttgagtcagagtctcgcactgtcacccgggctggagtataatggcgcagtctcagctcaccacaacctctgcctcccgggttcaagtgattctcctgcctcagcctcctgagtagctgggattacaggcacccgccaccatgcccggctaatttttgtatgtttagtacagatagggtttcaccattttggccaggctggtctcgaactcctgacttcatgatccgcccacctcggcctcccaaagtgctgggattacaggcgtgagccactgcacccggcctaaatcagcatttttaagggcgagatccaggagtcgatatattttttttaactcttgaagagattgcaatgtacagtcaagactgagaatcattaatttaaaacagagattcaaaaaggtaagaaacaaaaggatggacagagatacagcaagcaaatgcaagtgacaaaaaaatcaaggaccgtggtatttatatatcagataaattcaaggcaaaaagcattaactgggacacacgttggcttcatagtgacgaaagcaccgtccaccacgaagttgtagtggtcatgagcttattgtgtgccaaatcacagagcactgagatcttaggttgaactgcatgaaactgacatttttataggtcaaaactgatgaaatgttggcaagttcaacctgatcagtaaagcaaaatatgttcgtactcacagtatgctgtaaagtactaacagagcctgatgtaatgcaaacaatacatatattctggcccctgtatcatatggcttaactactgtggcattaaaatactttgaagttcagccagacgcggtggttcacgcctgtaatcccaccactttgggaggcggaggtgggcggatcatgaggtcaggagttccagaccagcctggctaagacggtgaaaccccgtctctactaaaaatacaaaaaaattagccgggcatggtggcacgtgcctgtaatcccagcactttgggaggccgaggcaggagaatggcgtgaacccagaaggcggagcttgcagtgagccgagatcgtgccactgcactccagcttgggcgacagagcgagactccatctcaaaaaaaaaaaaaaaatggataaaataagcctgatccagcctcccagagcaggccttccaagggcttcctcctgcctgtgggaagcgtggcctcacctgctcctcccaggagttgatgaccaccaggtgtgcgttctccagctggcagtacttctccgcctcagcccaggccttcccggagtgagagaaccagtagcagctgccttggtgctccacccagttgacggggcagcaggtcctttgggagcctgaggggacagggggcagggagatgagatccagccggaggggcaggcacactgggcctggagacggccccacccctaccgttgctgtggaggagctccatctggcaggccacgaagcgcaggtccacggggaagtgcttcagatggaagagcagggcatcgtgatctaggacagacaggctgaaagtgctgccggcaggtgtggtccccacctgctaggctccagcctgtggctggggaagcatatacacccacagacacgtacaccatgcatagaccacaccacacaccataccacacacacaccacagacatgtacaccacacatagaccacaccacacacagatccatcacacacacacaaacacaccaagagacacaccacacacatcacatgcgtacacacacatataccataccgcacacacacagactcatctcacacacaccaccacacatgcatacacacacaacacacacatatacaccacactacacaccacacacagatccatgacatatcacaccacacatacggagagagacacagatacacatgcttgcaggcacacacacgcacgcacgcacacgtgcacactacacacaccgcacacgtacacactacacacaccgcacacgtacacatgcacgcacatgcgcacacaccccggaggctctctgacctgctttcaggtcctgctgctgtttctccagcttggctcctagggatgtgatcttgtcacccacgctgcctcctggaagcggaaagccagctgtttccccgctgagcctccctccgtcctcatgctgctgggggaccgggggccagcgcctcgtcctgggcgatgcaggcgtccacctcctggcttcctggaccacacccaggctccctgcactgccacagtggctcaggccactctcctgcttcagtcccttcaatgggtccccattttctcaaaataaagcctcgctctgtcagcacggctcacctgcgtggccgggcccctccccacctctctctggccaccccttacctgcctgcccctccgatgggcctgccacactcgatttgctcacaggcccaagacatggtgccttcctcacctccgggtgtcgcagatccaacctctccacctggcactaacctcgtccgtccccacctgcctccctcctatacatcccccagggcccctggacgccttgcccagcctgcacccccacggcaccccacacagccctgttgcagactcggcactgagcccagcaaacctgtgcggataaatgagaacccagccgtccagcccctcaccgtgggtgctgattgcctggacctccgtcagggtgctcgaggagaagttgctgaaagcttccttcaggctccgcagctcggcttgcagctgtgcaccttgtcaggtggtagtgggggcaggatgaggcagaggggccgtgtccccatcactgtccatgtgactggcccctcaatgtccccgcatttgccccagcttgtgctccaccccgcctccatcccttcccctcccatcgccccgatcgctgcccgccactgcccatgtctctttccctaccccttgcccatccctgctggcccccgtgaccctcactttgggacccagtcacacagatgaccaccagcagcaggatgttgaagctcagggcaagcagactgaagcagaccatggagcagagacgctgtgccaggggctgggcaggaggtggccctgtgggagaggggcatcaggagccggcagcctgggtgtggggagccggagggtaaagacagggcaccgaagcctgaggaggcataacctgggcggggggattggttggggccatgggggggggtcatcataggctttgaccccagcatttgagcattacacacacactcttacacactcgcacccatattaccatgtataaatatacacacgcagctaatctggtgcacacacacccatgcacacgactcaggatattcacatcagctgtgtgcaaagcccggatcctggagctgggggactgggagacgcacagggggcgggggggcagacccggccctgcctaggcacacatcctgagaagggggatctgtgaatggttttcctcccatccagccagtggcagaggcctccagatcacctcgggccttagtctcagctcttctaaggctcctgtcccctcagattggagactccagaagctgggccctgtgttcttcctaaaatccatactggaacagtccctcccctgccaaaattccattgagatccttaaatctgggtcattccaccatagcccactctccaagcacaaccctccaggtcccacctgttgtcctcatcccccaccacgcaaggcctcctccccagcgccctttgccctcgcttccctagaaacctcgttccacactaaatttgctcccctcagcccgaggtcatctcacaggtacctctcctgccccttgatccatctgcaccctgacagcactgacacacacattcacatgccctcacaaactcacacacactcacacactcacacattgctcacttcactcaaaaacacacatttgcacacactcatgaccacgctctgctgtacccactctcacatgtgcatatgcatgctaatgcacacattcatactccctcccacacacacacacctgacacacccacacacgtacactcacacacccacgtcttcctgcacacagagctgggctccctctctgctgcctccagacccagagcagctccagttgtcccagccctgagctcctctctttgcagcatccacctgcaaacagaacaccttctaggccttggaccctgactctgtggacttccttgtcttctcattcctatcaccccccgacccagcaggaccacatcctggggaggctcagtcaggggcccagaatcttcctccccaggtcacttcctgccactgtcctgagtcagacactgcccctgtaagtgactgtccataactcttcatctttttcacaccagtgacttccaccttccccactgcagccacactcaggaccccatttgacccagggaggcctctgacacctccactgcccactcccgctctgagcacagccccaccctccctctcactgcccccaccccttcctccaaggcctttgcattcctctccatccagaagcgctccatgaccacggtgttccccaccaagctggccctccatggctgagtccctgactgctgtcttcagcaccctccactcagagggtcctgtcctgcttcccagtccgacttatcaactcccaatgctgggtcagcccagcaacgtgtctgtatatccaccctgaaaccagactgcccacagggtagcccagctgtgcctccaggtagctctgagatcatgcaccagcattcaatttctccatgcttccattttctcgtgtgtaaaatggagatcacagtcgtagctacccgattggattgctcggataattagatgagttaaaatatgtaatgtgcttcttaggcaaaagtttgaacataaaagacagggtctgcccaagatgggaagagttcttctctccccagaaacaatcaaaacaaaaacagacaactatagaacatggcagctttcaagactctggacatcaggcaaggaggagtaaagatccctgagggataagaagcaaacaacaggaaccctccgatcaccccagcttactgtttggagagagtctgcaggttacaggccaggaaagggaagtccaggcagagcccaagagactccccacgttgaggagatggagctgagagtccgaggagaccaaaacaattaagagttcaaacgatcaaactgactctaagttgcttaactgcatcccggagcaaagctcaagaacatttagaggaatacaaaaatatccagcacccaacaaggtgaaattgacaatgtctggcagccaatcaaagattacaaggcatgcaatgaaacgggaaaacacaatgcataacgaggaggttcataaatatcaaaagagatccagaactgacacggatgctagaattagcaggcaaggatggtaaaacagatattatagccatatcccattatgttcaaaaaattaagtagaattgtggaggatatttaagagtccccaggtgaacttctagagataaaaactacaatgtctgaaatgaaaaaacacactggccaggcgccgtggctcacgcctggaatcccagcactgtgggaggccaaggcgggcagatcatgaggtcaggagatcgacaccatcctggctaacatggtgaaaccccatctctactaaaaatacaaaaaattagccagacgtggtggcaggcgcctgtagtcccagctactcgggaggctgaggcaggagaatggcatgaacccgggaggcagagcttgcagtgagccaagatcgcgccactgcactccggcctgggcaacagagcgagactccgcctccaaaaaaaaaaaaaagaaaagaaagaaaagaaaaaacacactggatggaaataatggaagatgagaaatgcgtaagaaaaatttagggccaggcactgtggatcacatctgtaatcccagcactttgggaggtcgacacggggggaatcacttgagcccaggagctcaagactagtctgggcagcatggcaaaacccctctacatggcaaaaccgtctctacaaaaaaaaatttttaattagccaggtgtggtgccacatgcctatagtcccagctacctgggaggctgaagtggaaggatcgcctgagcccaggaggtggaggccacagtgagttgtgacaagctactgcattccagcctgggcaacagagtgagatgagagagagagaggggaggggaagcgagggaaggaaaggaggggaggggagggggaggggaaggggaaaattttagttaacttaatgaacagcaataactctataaaatgaaacactgggagaaaaaagaattaaaaaatggaaagagaatgagtgagctgtgggacccttaatacatgcataattgaaatctttaaaagaaaaagggggtagcagaaaaaaatcaagtgctgagacaagtggaagatgggccccggtgagcagctgatcagtgtcagctcccatgatgacgttcccccagcccccaccacccgggctgctggagggaaatgcggtgactttgctacatcccttcagacggtccctcactggtgtccctcagcccattcgcgtgagctcactctcccattaatttcagaaatcctggcctctctccaagcctcctgctcaaactctaaattctgtcaccctcagaagattcagcagcatcccgtattctctctgagtgttcactatgtaccgggtgccgtgtgggcactggagttgcagaggagagtgaggcggacagggcctctgcctgtggggacaccgcctggtgggaagtccagccagccccctacagagagaggagatgctactggtgttcctgagtggtcctcgggagggacctcctatccctcctgtcccctgccctgccctgcccagcaccggccctccctcggttggccagcctcaggaatgaggagtccctcattccagcccagctaaccaatccccttcctaagctccaagcccctgctcctcctgcctccatggaacccggctccaccaccagcacccacacacctgacactcctccattcctggctcttgcccttctgcctagcactgctcagatctctctcaccttaaaatcttttcccaccagcctgggcaacatagcaagaccccatttctctaaaaaattttttttaatttgccaggcacagtggtgcacacctgtaagtcctaactacttgggaggctgaggtgggaggatggcttgagcccaggagttcgaggttgcagtgagctatgatcctgccactacactcctgtctctaaaaaaaaaatgtccaagatacttaggtccttcagtcaagatttattacagaaggatccagggaagggtcttgggagatgagaggagcagggatcttccaggatctctctgtgctcacgtcccccacccatcccaactcaccccacctctacacacacacacacacacacatacaatcacatacacacactaacacacacactcacgcaacacactcacacacacaacatacataacacactcacaacatacacacacaacacacacactcgcacaacatacacacacgcacaacatacacaacactcacacaacacacaaacatacatacactcacacaatacacacacacaacacacacacaacatacacaacgtacacacacacaacatacacacactcatacacaacatacatacacacaacatacacacaacatacacacactcacatacacaacatacactcgcacaacatacacacatgcacaagatacacacacaacacacaacatacactcacacacaagatacacacaacatatactcacacaacatacacacacaacacactctcacacacaacataccctctcacatacacgacatacacacacacaacatatgcacgctctcgcgcacatatacacacacacaacattcactcacacacacacacagagtcccagctgaatctgcattcctcatatgcacatacgtgcacacgcacatacgaggcacatgtgttcttgggttgggaggagaagggcaggcagttatcttccagatctccccacacctctggcacatgcctttcctggggtcctggggtagacaggaaggtgaggtgagggaacaagcgggggtgtcgggccctcctcagtccctgttcacagagtgggtgcggcagagacctcaaagggacagagcaatcatgagctgagacagagggggagcaaagccgcagaaactgcacacttgcctttcaaaaatggatttcctctcctgggattcagcctgcgagtgcctggcccctcaccttgatggaaaggatggtcattttcctccgagctcagctgctggatatcttgaaagtccttggccatgatggggcccgggctggagctggagctggagctgggctgggctgggctgaggttgctctgagggctggggctggggcagaggtgcagattcacgtggaggttgatggtgggatggaacgcagggtcggaggggttcggggtggtggcctgggtaggatctgaggttggcagggcgtttgggatgaggtttgaaatcccgctgggtcctttcccttctcaggagaccgcttgggccttgacctggccaggagacccctccccacgctcatggacccgaccacccacagcttcccatggggtcctccccatccctgaaccaaggcctccttgttcccaagcatcctcgtcccagttgcctccccagcctcagttacctgtgaaaggtgtggagagcggacacctggctcccgcaggcaaccctggccttggccaaggaggggttaaagccaggagaactggggcaggtggagctcacaggggagaggagagtggaggaggggctggtccgggcaaggcctgcactggagggtctgagtgtccaagctctaacctggcacctcctggcctgggactttggacagtaaacagaagaggaaacagagctgtaactcatttgtggggtgggggcaggggacggggctatctctgttcttattcccagagaggggggtcccctgggctgcgctcaactccacacgccactcaccccactcattgcaccatttggaaggggtgccaggccaggaggggctggggtgcagtttgccgtttccctctctccctccccctctcacttcctgcctccgaatttaccagaactgtgggtgtctccaaatatccctgaccaggatcacagcgaccagttctctactcttgcccaatccggcatctgaaccacagaccccagcttcctgtgggctcggccaccagactctcagctctggcccaactcgcttcactctcctggagagtaaagcctctcaaatccagaagcttcagcaggaggaggaaggggctttgcagaaaaacagctctcctcgcaggaggaatccaacctcagagagccccgtccggcccagaccctgccccagcccaggcaacacaaacactgtcctcaggcccagccactgccctaaattctccaaggtgtttcttcatttatcacagcacaacacccccacgaggcaggacttctgttactcccatttcacagggttcggaagcggagcctcggagagatgaggcaacttgctctaggtggtggcccaggtgagtagagaaactggcaaagcaaaatggagtaaagaggggaaaataacatcataacaaaaggtctggccgggcacggtggctcacgcctgtaatcccagcattttgggaagccgacgtgggtggatcacctgaggtcaggagttcgagaccagcctggccaacatggtgaaactctgtctctactaaaatacaaaaattagccgggcgtggtggcaggggcctgtaatcccagctactcaggacgctgaggcaggagaatcgattgaacctgggaggcggaggttgcattagccaagattgcgccattgcactccagcctgggcaacaagagagaaactccatctcaaagaaaaaaaaaagaaagaaagaaaaagaaaagaaaaggtcttcatggtcctacgaggaagactggcttccatgaagcaaggaacgtggctgactgtctacacttgcgctaacaatagctcgggaaagaaaacacagtttttgtgcatgattttctgaccctcaccaaacttgggcggatggctacgggcagggtttcttataaagctgctcgtttccccgggtgccgaaaaggaattcaaacagaggccttttctgttcttgtaacttgctgacccacatgggaagtagccacccccccagtaccctgacattcccacccagccaccaggcagcagcagccgctgggctctctgactgcagcccacagcgagagacgaatttcatgctgtgatccagaacatacacacaagcacccgcacacacaggtgcatttgtatgtgttactttctcctggatccccagtgcctgccacacagtagctgctcaacaagtatctactgagtgagtgagtgaatagaataatgcgtttggaaatacacggttgacactaaagtttgatgggacaatgctcaccttactacgtgccttctgttgagtttcccagtccattaatgggtcacaactcaaagtctgaacaacactgctgtgaagcccccatcttaaggggcatgtggatttagtcctgagatacaggtaagagcttcacagatggattgtctactgcatgtcaagctttgccaactgccaaccagggatggggccatcctcattggccacccctttgactgaaccaattccacgtttcagggcttgtcacttacacccccactcacggcactacagggagagaagggacagagaaagccagactcatctgcgtccttctctttctccctatttgaaaatcattttaacttagaagttaacatgtacttggactatttctgaagtttccatattgttggaggttttctgttttgggttatggaatcctattttctttgattgattttttttttttttttttttgagacagagtttcactcttgtcacccaggctggaatgcaatggcgcgatctcagctcactgcaacctccacctcccgggttcaagtgattctcctgcctcagcctcctgagtagctgggattacaggcatgcaccaccacgcccggctaattatttgtattttcaccatgttggccaggctggtcttgaactcctgacctcaggtgatccgcccatctcaaactcccaaagtgctgggattataggcgtgagccatcgcgcccggccttatttggttgattttgatttggggtttatttgtacctcagacacaaaggttagattggtcatattccttacttcatgacactaggtcttcctcagaggtctgagctaaacctttgtcctgtttcgttcttccctagctcccatcctgtttcccctcactaattctatactctctactctctataggcagccagaagtctgagtgccctgacagtccccacagatggtgcccatcaatttctcccctcaccacatgtgcaagtcacaccactcagccaggggtagagtctgtttcccctccccttgagtctgggctggccctgtgacttgccttgaccaacagaaagcactagaaatgacactctgccagttctgggcctggacctcaagaaacctggtagcttcagttttcaatcttggaagtcagtcaccatgctatgaggaagtccaactatcctgccagagagagtcctgggggataagacagcacatggagagagaaagaggccacacagaggtgcactgaggccccagacatgtgagcaaagtcttctgggagtttccagggcagcccagtcaccagctgattgtatccaagtgtttcactccaaccaataccccgtggaccgcccagcctagccctgcccaaatttctgacccagagaatcttaagaaaaaacagttggtttaagccactggagctttggggtggtttattatgcatcggtagatagctgaaacaatatatattactaaatatgtaggtacccttataaaatatgtgatggggtttgcatgtctatctgttctgtatttacatacacagaactttcatatatctcatttgtttctgatctttttcactcaacaagaaattttttagagctatttgtattgctatttgttacaatggattgttacattgctatttgtttatctggtttgttgctatgaactgctgcacagtattcaatggtgtgtatccatcacagtttatttcccctaataatgaactcaggttgttgccaacaactatcacaattaacatgacgactgatgtcctcatcgtgttcccatgtggacctaggtgagaatttctcttgaaactgtatccaggccaggtatggtggctcaggcctgtaatcccaacaccttgggaagctggagttgggaggatcacttgaggccaggagttcaaggctgcagtgaactatgatcgcaccacagcattccagcctgggcaacagcaagaccctttctcaaaaaaaaaaaaaaaaaaaaaaaaggaatgaaagaaaagaaaagagaaacgaaggaaaggagggaggaaggaaggaaggaaggaaggaaggaaggaaggaaggaaggaaggaaggaaggaaggaaggaaactatatccccgaatggtattgctcattcgcagagtattgccatacctaattccactcaggactgccagactgttttccagaatggctctgccagttcacactcccaccagcagtatacgagggttctctttttggctttgtcgcttgatattattaacatcgcaattgttgccaagctgatgccatatccttgttcttttattttgcatttctggctaacagtgggtttgaacatttcttcatcgatttattaatcatttgggtttcctcctgcatgaattgccttttcatatcctttaccagtttttctattggctttcctgaattcactttgttgataagccagaatttcctgtatgttctacttgttcagaaaacgagaccttttgaaagttaaaaaatatatacatgttgttaactccagaaaaattaatagaagctctgaaacataaaatttagaaaatcttccaggaaaaaaaaaagacataggttttttttttttaaatgataaaagttaaattgggagaaattattttttctctggtctcatgctactgaatatatttcccactagggaaactagacaatctccagactccctttctctcttttttttctttctttctttttttttttgagacagagtttccttcttgttgcccaggctagagtgcggtggccgcgatctcggctcactgcaacctccgcctcccgggttcaagtgattcttctgcctcagccgcctgagtagctgggattacaggcactcaccaccacacccagctaatttttgtatttttagcagagatggggtttcaccatgttggccaggctcgtctcgaactcctgacctcaagtgatccgcacgcttcggcctcccaaagcgctgggattacaggcatgagccaccgcgccccgcccagactccccttcttaacccactcttcctcaggggaggaaactgactgattggcatgcttggctccgccccttgggggggctccctttggtgtctttctgcccacaagaagcacaccttgtattctactctctgccaggcggcacagagctgctcctgctttgccctcctctgcctgtgactgggtggatacatctgcttaattattggatgaactaattacaaggttttttgatctaaggttttaagtcaaatcctccttgttgcttatcagtaattatgctaacattttgatatccgctcatctgtctactgtgtcttggctctcaattgatttcaaacttaagaggaaaagatagggttcttttttttattagccccataaaacctccccaaataacacaaacaatatgttcaaagaaccaacatccaattaatagaagttctagaagataaataagaggaagaaaaggaagaaaaagatgaaagaaagaatacaaggctggtacttagaattaaaaaggataagtctccagatttaggtattctagtaatagcccagccgagcacattcattcaaaaatgacccaaagcgtgtcaccatgaaatttcagaataccagggataaacagaaaattccaaaaactaccaggggtgggagtaaatcacctacaaagaaacaagaatcagaatggatttcatttttcagctgttatattgaacacgaagagacaacaggatgatgccttcaaacttccaaggaaaatttttttcaacctagaattgtagactcaaatgatccatggcacgagaggggaggctacagaactgtcagatattccagttctcagactatttatctcctactcccatgtgaggaattaccccagaaagtgaggaaattatccaaaaacaacacatgtagaagaacatctcagtataagcctttttcattattaggaaagaaaatcttattcagctttttctgtattttttgcctacaggctgactttttttcttataatgcaaactggtgaaattccagaacctggccttggaaatgcaagtcaccataaagaacatgagtttaaggtctgggcatggtggctctcgcctgtaatcccagcactttgggaggccaaggcgggcagatcacctgaggtggggaattcaagatcagcctgaccaacatggagaaatcctgtctctactaaaaatacaaaattagctgggtgtggtggtgggtgcctgtaatcccagctactcaggaagctgagccaggagaatcgcttgaacccgggaggcagaggttgcggtgagccaagattgcgccattgcactccagcttgggcaacaagagcgaaactcggtctttaaaaaaaaaaaaaagaacatgagtttaaggaagcagtagagactctcctatgataagccgtcaaagtgagaacgtttactaactccccatcttgttctctcatgtactgtggaaacctaggtgggcacttataattcctgctgactttcggccgggcgtggtggctcacgcctgtaatcccaacactttgggaggcagaggtgggcggatcacgaggtcaggagatcgagaccatcctggctaacacggtgaaaccctgactctactagaaataccaaaaattagccaggcgtggtagcgggtgtctgtagtcccagctactcgggaggctgaggcaggagaatcacttgaacccgggaggcagagattgcagtgagccgagatcgcgccactacactccagcctggcagaaaagagccagactctgtctcaaaaaaaagaaattgttagcgaaacatcaggagttcagtctaagtcctgcggctttgctgcacacagaaagccaatcactgagatgatgagtagtgccaaggaagaaggctttaaatcaggtgctgcagccaaagagatggcagctgtctcaaatccatctcctggactgactaaaaccaggggttatatagcagggaagaaatgtaacaatgtgtcagaaaacaggaactagggaggtgcaaggaggcatttggtgcgtgatctggtgagtttcagttcttccatacatttcttttttttttctgagacggagtcttactctgtcacccaggctggagtgcagtggcacgatctcagctcaccacaacctctgcctcctgggttcaagcaattctcctgcctcagcctcctgagtagctgggattacaggcacccgccaccacgcccgggtaattttgtatttttagtagagacagggttttaccttgttggtcaggctggtcttgaactcctgacctactatacgtttttgagaggactgaaggtactttcctgaggaaggaactcaaatcaaacaaatataagtttcgtccgggcacagtggcccacacctgtaatcccagcactttgggaggccaaggccggtggatcacgaggtcaggagttcaagactagcctaaccaacagggtgaaaccccgtctctactaaaaatacaaagattagccgagcgtggtggtgggcgcctgtaatcccagctactcgggaggctgaggcaggagaatcacttgaacctgggaggcagaggttgtggtgagccaagatcacgccaccctactgcagactgggcaacagagcaagactccatctcaaaaaataaaaaaataaacatatatatatatatgagtttcaagctttaacggcagaagggtcaagttctatgtttatccaaaactgtctgtggaactatagggccggtttaaaaatcagaagaggggcactggccctttcctcttctcctatgggcatgatggaataactgggatttgtaagtctgctagaataacacttagcaaataattcgaattaagttaacactcaagacactgactgtggctaagaacgccacaaaggaagtcctcctgagaaagaagaatcttattttagagagtttttattttaagaaatagaaaactgccctaaggaaaacattgcaagattagaataactggcatatctccagtaaaagcaaaagaaactatgcaagaagagaaatgttatgacaatagagtactaggttctgcaggacataacatttacatagacatgtaatgtgaacgtttcattttcgtttttttactaaagatgctgatgtaactgcatttggaagacagcagtggctaagagctaatcctcatcttgggaaataagcagtagaatattaataaatcccctctccactttgtccaatggtcacctggcattgggagggatctagttcgaggaaagctgaccagtaattgtactttcctgcctctgtattatatttttatttatttatttaagatggaatctcgctctgtcgcccaggctggcatgcagtggcaggatctcaggtgactgcaacctcctcctcccaggttcaagcgattctcctgcctcagcctcccaagtagctgggactacaggcacctgccaccacacccagctaatttttgtatttttagtagagatggggtttggcgacgttggccaggctggtctggaactcttgacctcaggtgatccacctgcctcggcccccaaagttctgggattacaggcgtgagccaccgcactcagcccctgtccctgtattctaaaggatgttagcaagaaccctcggaagcccaaccacaggagaggcgtggacttagcagcaaccattgtaaacatcggctgtgggaagcagaggagaggggaacccgggagagccagttttcggggtgaaacaagcaggtggctggtgaagccactcatcggccaaggagcccgtgggagagctggttgccagcagggcaaggagtcgcggagttttgtttgggacatgggtttcttgtgctgttggtgcattcgggtggagctggctagaaggcagttggacatagatgggccggagactgggaaccaacaaaggcaatcaaagccagggaagcggagagaagggtctagaacagagcctgaaaaacacccacatggacctggaaaggagaaggggaaggtgcagccagagaggcaagaggaagacaaggagggcgtcatccagtccaggatgaatacctgagcctgtgtatttccctgtgatggttactactgagtgtcaacttgactggattgaaggatgcaaagtattgttcctgggtgtgtctgtgagggtgttgccaaaggagattaacatttgagtcagtggacagggagaggcagcctgccctcaacctgggtgagcactgtctaatcagctcccatctcaggtaggataaatgtaggcagaggaacatggaaggactagactggctgagtcttccggcctccatctgtgccccgtgctggaacatcggactccaagttcttcagcttttggactcttggaccagtggtttgccaggggccctcaggccttcggccaaagactgaaggctgcattgtcagcttccctactttggagatttggggacttagactggcttccttgcttctcagcttgcagacaccctattgtgggacttctctttatgttcgtgtgagtcaatactccttgataaactccctttcatatatacatctatcctattagtatgtccctctagagaaccctgactaatacattctctccacacaacttcccaatatgttccctattattacagtagtaataattcaatagagaaaatattcatataactattggaaattaagaaaagatttccctcacatgccacaaactctgaggcatctctgcaaggtgcagtgtggataagggtgagcgaagggcagaacagcccgggactctgttgtggagggaggcagaaggagccctatgtgtggaacaaacaggacccccagggaatgccacaaatatccctaccctgttcaggtggcgtgagcgggggacagggctatttggggtgccaagttcaatggtattgaggtctgcaagaagtgcctcagatgccaggtccagagtgagccgaggcctctgcagtactgtggctccccttagcagggcacactctaaagaaggcagaagtgctacaagcttggctgcaaactacaagagcaaaatgtcatagaggacaagtcgctgccccagctccctcttatattgccacataaatccagagaacaggccgggcgcagtggctcatccctgtaatcccaacactttgggaggccgaggtgggcggatcacctgaggtcaggagtttgagaccagcctggccaacatggtgaacccatctctactgaaaaaaaaaaaaaattagccaggcgtagtggcaggtgcctgtaatcccagctgctcgagacactgaggcagaggaattgcttgaacccgggaggtagagtttgcagtgagccaagatggtgccactgcactccagcctggtgacagagcaagactctatctcaaaaaacatctcattcgagcttaggaggtcaaggcgcagtgagccgtgattgcaccactgcactccagcctgggtgacaaagcaagaccctgtctctaaaagatataaataaatacatagacagatacatagatacataaatacaaagaaaacatttctccaagctgtatgaagcctttgtttcctattccaatgccttcatctagaaactggcctctagtttctgaaacaaacacaacaccattcattagctcatgctcatcagaaagtatcaggggccttcactgctccaagcatcagcagcaactcataacactcacacttccgagaccatcctggctaacacagcaaaaccccgtctctactaaaaatacaaaataaaattagccgggcgtggtggcgggcggatcacaaggtcaggagatcgagaccatcctggctaacatggtgaaaccccgtctctactaaaaatatgaaaacaaaaaattagccgggcgtggtggtgggtgcctgtagtcccagctacttgggaggctgaggcaggagaatggcgtgaacccaggaggcggagcttgcagtgagccgagattgtgccaccgcactccagcctgggcgacagagcaagactccagctcaaaaaaaaaaaaattcacacttcatattctcttagttcccccaaataaagccagggcgttttttcccctctgataataagcatcccgtaattgtgtttcctttttcattttagcttccaggaatctcagagtgaaaccagacactacacgttaacaactttgtccgtggcacacgcctgtaatcccagcactttgggaggctgaggtgggtggatcacttgaggtcaggagttcgagaccagcctggccaaaatggtgaaaccccttctctactaaaaatacaaaaattagctgggcatggtggtgcacgcctgtagtctcagctacttgggaggctgaggcaggaggattgcttgaacccaggaggcggaggttgtagtgagctgagattgtgccactgcactccagcctgggtgacagccagactccatctaaaaaaaaaagaaaaaaaagaaataggtaaagggaatgttgtgtcctaactggagttctctgagggccaaggacctcagaattaccttgctcaaacaaagcctgaaagagccaaccctagctaaggtgaagggtgttcctgctcagcaacccacagtctctgggaagactggaagagatcttcaagagttcctgtaaccttgcagtgtgaaagcaaagcgtgagtgatccaagggaaagtcctgtgcgaccccagaagtgtaggcagcaagccacccaggcgctgaggcaagagaccgaggacacgagctgttccagtataataaaatataaaacaagaatagttataccagatatagatcttagatatgattatatatgaatatcaataatcattagtttgtagcaattactctttattccaatattataataatccttgctctataatcataacctaggaaaaaccaggccatacagagataggagctgaggggacacagtgagaagtgaccagaagataagagtgcaagccttctgttatgcccagacagggccaccagagggttccttggtctagcggtgatgccagcgtctgggaagacacccgttgccaggcggaccgtggtctagcggtagcaaaaagtgtcaaggaacaacacccgctacttagcagaccgggaaagggaggctccctttccccgggggagtttagagaagactctgctcctccatctcttgtggagggcctgacattagtcaggcccgcccgcagttatccggaggcctaaccagagtctccctgtgatgctgtgcttcagtggtcacgctcctagtccgccttcatgttccatcctgtacacctggctctgccttctagatagcagtagtcaattagtgaaagtactaaaagtctctgacgtgcagaaataatggcataagctgtctttctctctgtctcctctccctctctgcctcggctgccaggcagggaagggccccctgtccagtggacacgtgacccacgtgaccttacctatcattggagatgactcatactctttaccctgccccttttgcttcgtatccaataaataacagcgcagccagacattcggggccactaccagtctccacgcattggtggtagtggtcccccgggcccagctgtcttttcttttatctctttgtcttgtgtctttatttctacactctcttgtcaccgcacacggggagagacccacagaccctgtggggctggtccctacaagaaggaaaaaggttgagccaaaggaacccacccaggaggtggacaggtggagaccactgtaggagctgaaaagaatgcatttcccccataaggtcatccacacaagtcaatcataaatgcctggtagagttggatcctgctcacactgaataaatggtaaagaattctgtgttgttggtgggactgtaaactagttcaaccattgtggaagtcagtgtggcgattcctcagggatctagaactagaaataccatttgacccagccatcccattactgggtatatacccaaaggactataaatcatgctgctataaagacacatgcacacgtatgtttatagcggcattattcacaatagcaaagacttggaaccagcctaaatgtccaacaatgatagactggattaagaaaatgtggcacatatacaccatggaatactatgcagccataaaaaatgatgagttcatgtcctttgtagggacatggatgaaactggaaaccatcattctcagcaaactatcgcaagtacaaaaaaccaaacacggcatgttctcactcataggtgggaattgaacaatgagaacacatggacacaggaaggggaacatcacactccggggactgttgtggggtggggggaggggggagggatagcattaggagatatacctaatgctaaatgacgagttaaggggtgcagcacaccaacatggcacatgtatacacatgtaacaaacctgcatgttgtgcacatgtaccctaaaacttaaagtataataataataaaatgttaaaaaaaaaaagaattctgtgttcaccccagcaggaaagtgaaggaacttagttgcaaccatagtggtggttcagtattccaactattcaggtcaaccaaaaaaaaatatatggaatatggaaaaatatagaacccaagaaatatgggctgtgagttcaatcccatctggagagcatggatttagcaactagaacgggatagagagcttctccctgtggctccaggaaaattatactagtgacgagcagcccagaccgcatacattcagtgtcagaactctgtccagcaagcagccccaggcaacgcctggcaaccccaggggatacagaatgcgaatgcttttccctcaagaaagtgtattccagacctaggaaggtttgaaactaaatatataggcaacaaagtaaatccaacatgtagtattaatacatttgtgccaaatttaagataatctatatttggtattataatgtgtaagaaaattcagcatactaaaagatttgaaattagcctgtgatagcaaattaaaatacaaaatgaagtacttgattttagactcgtgctttctttttcagttgaaatgtatgaaataatttgattaggtttgtaaacaatgttggaatgttgaagagtccttgagattccttatgaatattaatttgccttatttacttagtttttgattgttaaaatcaaatccttaaaatacaccaaatgtgtaaactcagtttaaaaatgtttctaggcatttaactgcattgtgaatgaagctgattatttaagagagtttcgtgtctttgactttcattattatgcaataatcagtgagaaggtaaagtcggtggctcttatttagcacaatttattaaaagaataattacggccaggcacggtgcctcacacctgtaatcccagcactttgggaggccgagatgggtggatcccctgaggtcaggagttcgagaccagcctggacaacatggtgaaacccagtctctaataaaaatacaaaaagttagcctggcgtggtggcacttgcctgtagtcccagctactctgaaggctgaggcaggagaatcgcttgaacccaggaggcggaggttgcagtgagctgaggttatgccattgcactccagcctgggtgacagagtgagactctgtctcgaaaaaaaaaagaataactacttttataagctgaacttacaagaagtttaaggaaaaattagatttaaaatgtactttaacaaactgacaatttctttaaggaaacaaaatgataaacagttcattcagtacacaaataccagcatgaacatgaaaagctctccttgactttagggtccacatgccaaatggcagggtccaaggcaggccaccggagacagcgccccacccatgccaagaccacctgcagcagcgccaccccggacccccctttcaccaggcaagtggacagggcaaacatggacaggcccccggcaccagtctgagaggcccagaggctaagagggtgggcttcatgccccggctacccgtgtccccacatcaggagactgtgcacccccaccacacccctctcctctttcctccttgctctgtttttctccacagcactcatcgccatttgataatgaatgttatgtatttcggttattatctttctgcacatacagccaggcatggagacttaggctcactcagtcctaaatccccagcacctagaaaggtacctgtgcttggtctgtccccataaatctgtgttgcatgaaggcactgatggcctcagctcctgctttgtgcccctctccctgtctggactgccagctccctgacctcaggaactaccttactcaccactcaatgtccaagcccagcaccaacccagaaaaaaaaaagagtcagacgcatgtaaaagtgactccctgtgggaagccaggcagggccttcagaatcaaacgtgatcttgaattctggttctgccacttaccagccataagggaaccttggataagtgactcaaggtttctgatattcagtttcttcagctggaaatgggtataataatacctgcctcactcggttcttgttggtattaaacaggttaatgtaaggcaaagtgtctaacactgagccttttttttttttttttttttttttgtataagcaaagccctcacattgtaggtgctcagtgaaaatcaattccttaactctcatggtaggtactcaaagaaaatcaattactggctgggcactgtggctcacgcctgtaatcccaacactttgagatgccaaggtgggtggatcacgaggtcaggagatcaagaccatcctggccaatgtggtgaaaccccgtctctactaaaaatacaaaaattagctgggtgtggtgatgcgcgcttgtaatcctagctactcgggaggctgaggcaggagagtcgcttgaacccgggaggcggaggttgcagtgagccgagattgtgccactgcactccagcctggcaacagagcaagactccatctcaaaaaaaaaaaaaagaaaaaagaaaagaaaatcaattcctttactcattttaacttcctccagttgctgcagaaaaagctctgcttccctccccctgagcttcaggtgcttgacttatatttactcccctggggaatgacaggagtcaatatgggcgggctggagaacctggcacctgagccccagaggaaggccccagcttcctgcagctcgggctggcggatgggagcagaagcatcagttcctggttgggaatttggagacaccaacaatttggggaacttcaaaagcaggaagcaaaaaagatgtgagagaaaggggaaacaccaaccctcctagacagcccccctccccacccccaatcacaaaaatgcggagcccaggagagccaactcctgggaagggacgaattcccagttcctaccccggcccatctccagcctggtccagaactcagtcctgaacccagctcccggctcccacacctccatcagccccaaccccactagcagcctgtcccaggcccaattctaacaaagacaaggggtgggaccctggagaaagtggggttccccaaatcacgagagaattccctggcctctctgccatctgtttccacttcccctggtctctgtcttcctgtgtttatctgcctcattccgtacttcggctgttccctcctccacaggctctctctctgcctgtctctggctcattcactcacatattacacagcaggtatgtgctggggaagagggagcaggccagtgagtgaaagcagaggaggcagaggatggggccagagagggaggcaggggctggatcacggggacctccagggcatggaaggccggaagagttttcttctctgtgaaatagggaattattgatgagttaaacaaggcgacacatagcctgattacattttttaaagtcaccttcaggctgctgtatgaggatgaacctttaggggtgagagttggcaggggatgttgttgccaaagtcccaaaagagagatgacgatggtgtttgggactggaggtggctgtgacaacagtgagaagatgtcagattaaaagcagatcatgtcagggtgcggtggctcacgcctgtaaccccagcactttgggaggctgaggtgggtggatcctctgaggtcaggagttcaagaccagcctggccaacatggagaaaccccatctctactaaaaatacaaaaaaaaaaaaaaattagctgggcatggtggcaggcgcctgtaatcacagctacacaggaggctgaggcaggagaatcgcttgaacccgggaggcggaggttgcagtgagccaagattgtaccactgcactccagcctgggcgccaagagcgaagtctccgtctcaaaaaacaaaagggtagatagtgaatcttggaggaagaaccatcaactcagcactggctggggagggcctgtgggcgaggaaaggaaggcttcctgaagaagctttgtatgctgctgagaaagtgacagcagggttaactgagcgggaagagggggcaggaatgggttaaacgcgcaatgtagaaagaggaactgaaagggccgggcgcggtgggtcatgcctgtaatcccggcactttgggaggcccagggaggcagatcacttgaggtcaggagttcgagaccagcctggccaacatggtgaaactccatctctactaaaaatataaaattagccgggcgtggtggcacgtgcccgtaatcccagttactcgggaggctgaggcaggagaatcccttgaacccaggaggcggaggttgcagtgagctgagatcacgttattgcactctagcctgggcaacaagagcaaaactccatctcaaaaaaaaaaaaaaaaaagaaagaaagaaagaaagaaaagaaaagaaaaagaggaactaaaaagagctcaatttgggatagacggtgtttgtgtttgaggtccctgttagaccctaaggtgagatgccagggcagaagctgaataaacaatccaggcaggaacacacactcacacacattgaccccaatcccatgagccccattgtcctgaagacacatccctgctcctgcccagctggtccctgacccctgacccctggctatgctggcctcagatctgtgtctccttctcaagtcattggcccccagggccactgtccctccgtctccactgggtgcactggaaaggcagggtgaggtacaagaagccccatttaaaaccatgaaatcagcagctcaaacaccagaaagtccccagcttttgcaacagctcataaggactggtgtttcctgcgagcagtgacaccctgcaggtttctaaactctgcttctctttgttttgtaaagcagtgttctatcagtcccggaaagcccctggagtggatcacgcctccctaatctaccgtgttctgcatttatctgcatctgcaatgtttgttgtggtcttgttgctagaggcctcgttccccctgcctggtttataaaatccatgtaacccaggattttttgtggtgtggatactctacattgaaaggacatgcatgctttctattttatttatttatttatttattatttttatttttatttttatttttggagacggagtctggctctgttgccaggctggagtgcagtggcgcgatctcggctcactgcaacctccacctcccaggttcaagcgattctcctgtctcagcctcccgagtcgctgggactacaggcgctcgccgccacgcctggctaattttttttttttttttttttttttttttgtattttagtagagacgatgtttcaccgtgttgcccaggctggtctccaactcctgagctcaggcaatccgcccgccttggcctcccaaagtgctaggattacaggcgtgagccaccgtgcgcggccgacatgcatgcttttgaaataccacaagggcactggggactggaaacaggaacggaaacaggaaaggttcccttgtccccgtcgcagggcgtgtgacagcgggaatagctcgttttttcagaatcccactgctcaaacctctagggggagcctgctgacgggcagcttgtggggctccaaccccacggcagcatctgggggtgaatgcttacagctcctgaagccccagtgggcgtgtgtgacgggggctctttcagttttgccgtctgtaggcggcttgtgttcatcagctctattagaccttctgcctcatcacaagcacagagggctttctgtgtcctggggttcctgccttggtgtactggaagaatgggatcacatgtgggcttggagaatgagtgtaaggttttttatggagtggtagttctcagcgaggtggatggggtggccagaagggggatggagtgggaaggcggtttcccccggcccggagtcgggccacccagtgcccgggcctcctccaaccacctcggccatactccgcaaatcgttctgctggtcagtgacctgccggcatccacctgtcagtgtactcctatgcccgtgcgttcccctcgacgtccagccacttctgtgtctgcccgctagggtctcagggcttttataggcacaggatacgggtgtggcaggccaggatggtcttgggaaatgcaacatttgggcatgaaaacagaaatgcctgtccttgccgaggtccgtgggcacaggcccgggggtgaagccctagccagagacccgcccttctctccccagcacttccctgcccgactcctgtatcagaaccaaatggttttctgtcttctcgacaagatcacaaggttctttgaagccaagcacaaccagagggtcctggggggtgggggtgggggggcaccatatgcccatagcgtggcagctcttccctgtgccagaagcacagaaatgaagggaccctgccttcaggaacagcacagttaggaggaaaataaggctgggcacggtggctcatgcttgtaatcccagcaccttgggaggctgaggcgggcagatggcgaggtcaggagatcgagaccagcgtggccaacatggtgaaaccccgtctctactaaaaatacaaaaaagttaatcgggcatggtggcgcacacctgtagtcccagctactctggagactgaggcaggagaatggcttgaacccgggaggctgagttagcggtgagccgagatgacaccattgcactccagcctgggcaacaagagcgaaactccatctcaaaacataaataaataaataagaggaaaatatacaggttcacaagcatggagtgagtgggaccccagaaataaggtgtccagggagggttttctggagaaatggtgcctcagccacccctggaagagcctcagtccagaacctcaccctccagagtttccacctacacacctgcctgtcaaaagacagcaaactccaggagagccacttgccacaagtatataggatctaatatgtttgtttgttttcatataaaattaatttcaaattaaatattcctggatgatgaggagttaccgaatgggtacaaggtacatttgtttgggtgatggagattctaaaagccctgagttcaccactccacaatctatgcatgtcacaaaattacacttgtttcccataaatttataaaaataaataaagctgggccgggtgccgtggctcacgcctgtaatcccagcactttgggaggttgaggtgggtggatcgcctgaggtcaagagttcgagatcagcctggccaacatggcgaaaccccatctccactaaaaatacaaaaaaaaaaaattagccgggcacggtggcgggcgcctgtaattccagctactcagaaggctgaggcaggagaatcgcttgaacccgggaggtggaggttgcagtgagccgagattgcgccattgcgctccagccagggcaacaagagcgagacgcggatcttttgagcccaggagttcaaggctgcagtgagccatgattgaggcactgcattccagcctgggcgacagagccaggctcatctcaaaaactaaaaataaagaaattctgacacatgctacaccatggataaaccttgaagacattatgctgagtgaaataacccagtcacacagggacaaatattgcataatcccactacctaaggtagtcagattcatagagacaaaaagtagaatggtgtggtcgccagggggaggggttggtgggcggggaatggggagttgctgttccatggatttagagtctcagtttcacaagatgaaaagagttctggccgggcgcggtggctcacgccggtaatcccagcactttgggaggccgaggagggcggatcacgagatcaagaaatccagaccatccttcctggccaacatggtgaaaccacgtctctactaaaaatacaaaaattagctgggcgtggtggcgggcgcctgtagtcccagctactcaggaggctgaggcaggagaatcgcttgaacccaggaagcggaggttgcagtgagccgagatcacaccactgcactccagcctggcgacaaagcgagattctctctccaaaaaaaaaaaaaaaaagatgaaaagagttccatggatggttgcacagcaatgaatgtgccgcgtgcaacagaaacgcatacttaaaaacggttaaattttatgtggtgtgtattttaccacaattttttatgtaaaaggcaaagttttaaaaattactgcaatcagtattaaacctcatttcatatttctagtttactctttcgcccttaggaagttgggtttttttcttttttctcttatgttcccaacatcaggatagcagcgccaccgtgtggtcacagctgcaggtgccagtctgaaagaagagagactcccctgcaccccaactattttttaatacaggttgagcgaccctaatcccaaaatccaaaatccgaaaggcaccaaaatccaaaattttctgagccacaagtggaaaatgtcacacctgacctcatgtgacaggtttcagtcaaaatgccatcgaaactgtttcatgcacaaaatcatttaagataatatataaaattaccttcatagcctggacaacatagcaagaccctgtctctacaaaaaatttaaaaattagccaggactggtgttgcacgcctgtactcccaacgactcgggaggctgaggcaggaagatcacttgaggtcaatcaatctgcattatacttctaagtagctgaagtgaaacattaaacagtaaagagatcattcttacatagctaagagtattcaattattcagctcctgagaactatttggctacacttacttattatctttcttttgccaactggtaagacatcctagcctgaatcacaaaaacactttctggttcacatcttagagtcgaaaaaggcttgcgaagcccctaaaggtgttgaggcagcttggcctgagaccgtgatagcttctgtttcatccccagatctattacatggagttcagaaaccaggacgattgcatttataagccccaaatttaaaagattatttgaaaaagagcttcttgagttttactcttgatacactaaatgcaatccacagcctctctgccctaacagactttcgtgttccttccctcttttatagtaaaattaggaagtggggagacgggacaagtaagtaagggaatctgcacaggctgagcaaccccaccctcagccttgctgagttctctccacccagaggacactgtactcctgctctgggaagacagcgcctcccgccaggggattccgccaaccaccgctccctgcaatcggggttaccagtgatgattcttcccccagcatcaccctacggtgtcttggcagcctgcctccttcacagactgcctcgagagtccctcagagctatttccttaaagaccaaatgcgagcatatcttcactgacggggtttcagagcctcactttgcaagttttgaggcagaggctcaaactaattttgctgagaaggacaggagagctgagagaaaatcaaacagaacggcggctctcctcccattcatggcatgtaatgctctgggcccagctacatctgccatggcctccagggacctgctggaggggtctcccagccccacctggtataagccaagcctgctccagactcaggatctgcccagagggctgggatctcacagcctgaggtaagcatgagtcagtctgaatgtaatctaccctccctacaccccttcccagccccagcctctctgaggggtctcatagccacccagcctgcctgtgacctttgctggctatagcttttcttcccattaactttttttgttttgtttttgagatggagtttcactctgtcgcccaggctggagtgcaatggcgcgatgttggctcactgtaatctctgctttccaagtgcaagcagttcttccccctcagccttccaagtagctgggaccacaggcacccaccaccatgcccggctaattttggtgtttttagtagagacagagtttcaccacgttggccaggctggtctcgaactcctgacctcaggtgatgcgcccgcttcgacctcccaaagtgctgggattacaggcgtgagccaccatgcccggcccccattaacttttaataataaaacatggtggccaggcgcggtggctcacgcctgtaatcccagcactttgggaggctgaggtgggcagatcacgaagtcagcagatggagaccatccaggctaacacggtgaaacaccccgtctctactaaaaatacaaaaaaattagccgggcgtggtggcggacgccggtagtcccagctactccggaggccgagacaggagaatggtgtgcacctgagaggcggagcttgtggtgagccgagattgcaccgctgcactccagcctgggcgacagagcaatacttcatctcaaataataaaataataataataataataaaaacatgctgcctgattacaggaacttaaacttgttttgtttacccaagctgacatgtaaaagttactaataacttctttgtctaggcaagttagcaaatgactttgtaagcactgagcagctccccttaactgtttaagtgggaagccagccgtcgcctaccccaggcaggggaggcaggacttctccagtggctcaggggagactgcccttctttgccagttttggtttgcagacaggtcactgaaaggtggggccaaaaagcttctgtgaagcaaagaaatttgagaccctagtccctttcttttggagatctaatgtccttagaacctctgtgatgaacagaggctctagctgaagtccactgacggggaaaggcaccaaagggcccgagggaagcccatcatgactgaagaggaaatagaacaagtgaccctgtgtcttagtcagcttgcactgccattgcaaaacaccacggactgaatggcttaaacaaaaaaaaaacatttctttctcacagttctggaggctaggaagcccaaggtgaaggtaccggcagatccagtgtctggggagggctcacttcctggtttacagacagccaccttcttgctgtgtcctcacgtggatgagagagcacactctggcctccttctcttccaacaagggcacaaatcctatcgtggggaccccaccctcacaacctcatctaaatgtaattatctcccaaaggccccacctccaaatatcatcacactgtggagtagggcttccacctatgaatccggggtggggaggacagaaacattcagtccctagaatcctgtatcagtgctaaggcctggtagggtttgtgagggaagccgcgtttggcacaggctgaaggtgccccctcaccagatagaggctgagaagatgtgctttgaggacctctgctgagcagggctatgaactgaagtgttttttcctctggagcccgaggacacggtgcagttgctcagcagcactaaggagggactgggtgtgccctgagcaagctgtcattgggggttaaagactgaaactgtcacagcctaggtgcctagtggcttccgggacagagctaagcagggcacaacaggggtagacggtctgttccattaagcttttgaagctcgttgtctgaggtaatacccaaggttcatcgtctcatgccaaggaaattgaggatgcaggcacacacgacgagtgagtttaagagcagaggtttaataggcaagagaaagaaaagctctctctcctgcagagagggaggggctcccaagtcggtcttctggctccgaggtgaaatgcactgggtgttataggtgagcttgaggaggcagtgtctgatttggaggttttgccttgttttgttttgttttgtttttgagacagagtttcgctcttgttgcccaggctggagtgcagtggcacgatctcggctcaccgcaacctctgcctcccaggttcaagggattctcctgcctcagcctcccgagtagctggaattacaggcatgcacaccacgcccggctaatttttgtatttttagtagagacggggtttcaccatgttggtcaggctggtctcaaactcctgacatcaggtgatccacccggctcagcctcccaaagtgctgggattataggcgagagccgccgcacccacccggccaggcagtgtctgatttacacagagcccaaaagattgcgggaccaggtatgccatttacatagtgcaagaagaagctggccgccccaccctaatcttttattatgcaaatggattctctacctggttggcatcatgttgctgcttcctttactgtacaggtggttgataaggaaaagggaagatgaagcctccatgttgaacatgcctggccccaggtagccttttccgattggcacggctgccgccattcacccgttcaagcttccagcttgcctgtcaatgtctgcagctcgattttacaggctgctctttgttagaaaagaaatgatgtgggggctgctttttgttaaaagggatgccttaccgaggactctcttaccctcaccaactgcctaagtaatttctttttagctcccgtattactgcatcaaactatagccagatccacggtgactacagcgcagccacggcaggggtggcctctggctgagcgggacttgtttgcagcagcagcatctggtggcaatcgcagaaataagaaggcagtcgaggccgggcacagtggctcattgctcattgcttgaacccagcaggcagaggttgaagtgagccaagatcgcgccaccgcactccagcctgggcaacagagtgagactccgtctcaaaaaaaaaaaaaaaaaaaaaagaatttcggcatttgagaaaaggcttaagaatctggcattgaacaggctatccagcccaaaagggacctcacctgctttgttgattgttgaatggcccaactacatctggttgcagtggcaaacggctgacctccacgagcagctgaaagtgcctcctgcaagtgaccgactcatccaggccttggaccgagaaaacagctcctcaactgcatcagctggaccatggtacagaccagagacagggcaagaaaagaagcagaggctattggcccgtgcagagaagaaagctgccggcaaagggggcatctccatgaagaccccaactgtcccacgagcagggttaaccccgacagcaccttggtggagaacaagaagcctcagctggtggtgactgcacgtgactctcgtcgagcttgctgtctctctgtctgcgctgtgtcctacagtggggttcccttactgcgttatccaggggaaggcaggacggagatgcctggtctgcaggaagaccccagaaaagactgtcaccttcacacaggctcactgggaagacaaagcagctctggctaaggtggcggaagctatcaggaccgattacaatggcaggtgtgacgagatccacagtcactggggaggcaatggaacctcctttgcaaaaattataactgaggaaattatgacagtgaaagaaatcagacctaaccgactccatcttgcgtctaacctttaagctgtccttgtccattcctcggcgtgggctgaacaaacttcggggaggaattcagctcgtggtttgactctgaaacaaaattgataatagcccttaaccgaaaagactcttcttgcctggggaccagtctgcctttgcaagactaacagattagctacgagatcagaaattgtagtttaggggtcatgcagactctgactctaagagtcggaacttccccacattgctcctgggaataacatcactattgtaaaacctaagatcagtacttgagatacttttcagaccctgcactcgatagatcagctgacaccacccagactcataatctgacctaaccagttctgccaccgcacccaggaacagaagacagcaagaaaatctcactttgatctcctatgattccgtctccaacctgaccagtcagcgctcctcacttcccaagcccctatccgccaaattatctttaaaaactctgatctctgaatgctgggagactgatttgagaaatagtaaaactctgggccgtgtcacgtgcgtccgagtgaagagcccaccgaacaggctttgtgtgagcaacaaggctatttatttcacctgcgtgcaggcgggctgagtccgaaaagagagtcagcaaagagtggtgggattatcactagctcttacaggtgttgggataggcggtggagttaggagcaatgttttgcaggcagggagtggatctcacaaagtatacatgggtggggagaattacaaagaaccttcttaaggttgtgggagattacaaagaaccttcttaaggttgtgggagattacaaagaaccttcttaaggttgggagagattgcaaagcacattgatcagtcagggtggggcagaaacaaatcacaatggtggaatgtcatcagttaaggctattttcactttttttgtggatcttcagttgcttcaggccacctggatgtatacgtgcaggtcacaggggatgtgatgccttagcttgggctcagaggcctgacaggccgcgcgtggtggttcacgcctgtaatcacagccctttgggaggctgagatggggggattacgaggtcaagagatcgagaccatcctggccaacatggtgaaaccccgtctctactaaaaatacaaaaattagctgggcatggtggcacgcgcctgtagtcccagccactcaagaggctgaggcaggagaatctcttgaacctgggagttggaggctgcagtgagctgagatcacgccattgcactccagcctgggcaacaagagtgaaactccatctcaaaagaaaaagcctccggtctcccgcacagccggctctgcgtgaattgctctttctccattgcaatttccctgtcttaataaatcggctgtgtctaggcagcaggcaaggtgaacccgttgggtggctacagcaatgccctgggtccaaaatctggctcagacattgctaaactgcaaaaggcaaaggctaaagaacttgccactaaactgggttaaacgtccactgttgagttttctgtacataaattctttttttaattctccttcaaaaaaaatactggtctatcaaagtggctcctgccagtaatcccagcaatttgggaggctgaggcaggagaatggcttgagcccaggagctcgagaccagcctgggcaacatagtgagacccctctccctccaaaaaaaaaaaattagccaggcgtggtagcacatgcctgtaatcctgtcacagggcgaccccaaaattagaggctcagcccaggaggtcacatgggttcttggctttacacaggaaggaactcaagagggagtcaacagctcaagcctgtaattccagcactttgggaggccaaggtgggcagatcatctgaggtcaggggtttgagaccagcctggccaacatggcgaaaccccgtctctactaaaaatacaaaaattagccaggtgtggtggtgcgcacctgtaatcccagctactcaggaggctgaggcaggagaatcgcttgaacccgggaggtggaggttgcagtgagcccagattgtgccactgcactccagcctgggtaacacaatgagactctgtctcaaaaaaaataaaaaaataaaaaaggccgggcgcggtgactcatgcctgtaatcccagcactttgggaggctgaggcgggcgaatgacaaggtcaggagtttgagaccagcctggccaacatggtgaaacgccatctctactaaaaatacaaaaaattagctgggcgtggtggcaggcacctgtaatcccagctacttgggaggctgaggcaggagaatcgcttgaacccgggaggcggaggttgcagtgagccgagatcgcgccactgcactccagcttgggtgatagtgagagactctgtctcaaaaaaaaaaaaaaaaaaaaaaaaacagagggagccaacagagtaaagtgaaagcaagtttactaagaaagtaaagggagaaaagagtgcctactccataggcagagcagctccaagggccactagttggctatttttatgcttatttctttttttaattcatttatttttcaaatggagtattatttcttgatcttatgctaaacaaggggtgggttattcatgaggttttccggaaaggagcagccattcctggaactgagggttccccccgctttcagaccacatagggtaacttccaagtgttgccatggcgtttgtaaactgtcctggcgctggtgggcgtgtcttttagcatgctcatttgttataatgagtgtatcgtgaatagtgaggacaaccagaggtcacttcagttgtcatcttggttttggcgggcttcgatccacttatgtaccgcatcttgtttcagcagcggggtcctcgtgacctgtaccttgcaaaacctgtcctgacaaactcctgtctcagtcccagtcactcaggagtctgcggcaggaagatcacttgagcccaggagctcgaggctaaagtgagccacgattgtaccactgcactccagcctgggcaacagagcaagaccctgtctcaataaataaataataaataaataaataaaggcacaaagatttcccatatactccctaccccaccccccccacccccacacatacacaacctctctccgtagatttgttgttaatgtttgtctgcataggttgtacctctggtatgtaatttttgttttaatcgtttgtaacaagttaatttgtttttaaacaggcaacctgcacttccccaaccccagaaagtgctgataatgaagagtttatttgctcccaaaacaaagctaagttttcatctcaccagtgggagtattaccctctgtatttttaggtcattaaatatttgcaataaaaaatacaattaataatttagtgtacctaagtgatgtgtgtattgaaggatttagcacctcccttgaacaacaaaccgtattgctcagctgagcaccatcctcttgagggacattgaagaatctttattttgtttctaaacaaaataaaggacaagaactccagtcgttagatctgtgaaaggaaaataaatctcggggccaggcacagtggcgcactccttaaatcccagcactttgggaggccaaggctggcggatcacctgaggtcaggagttcaggaccagactggccaacatggtgaaaccccatccctgctaaaactacaaagactggctgggcgtggtggctcacgcctgtaatcccagctactctagaggctgaggcaggataatcgcttggacccaggagacggaggttgcattgagccgcacacctctgcactccagcctgggcgacttcacacacctctgcactccagcctgggcgacttcgtctcaaaaaaaaaaaaaaaaaaaaaacccgcaatctcaggatcccaaaatcactaagccaaaggaaaagtcaggcaaaggtttgcctttttattcctcccattttattcctaaataagatagctacaaagatgaaaaagcctacatacctccctcacaatttgcccacactgagccagactaaattgtgtgttcagtgaaaggctgatcaaggacttaaaaggatgcaaccttttgtctctcctctacctatgatctggaagcccctctccctccccccttccccacccccactgtctcatgtctccctaaaatgtataaaagcaagctgtaccccaaccaccctggccacatgtcatcaggacctcctgagactgtgtcacgggtgcatccttaaccttggcaaaataaacgttctaaattgattgagacctgtctcagatcaaaaagtgttatggtacattgagttgcattttggattttgggtgtgtgtaaattgtcctcttctccacaaaatcagaaagtgtggccctgcgctggagagggcggggtcgccccagtcacctgagcaaggaaacccccaagcccaaggaaaagagagggagcagagaggaggggaagctgcaaagcccactgccccgcccagagccacccaccagcctggaactcctctgcagaaaaacaaggaaaatacaactgaagcttgtttgatggcaaatgctttcctttgccttgtggatgatggaatgcagatcgctatgacgatgggagcttaaattagaggaatttatccaaaggaaagaaggaatttcctccacggagtggcctagaaactgcagagaaaaacaaaggaggtgaggtcaagtcacttcaaagtagtcagtagtcacagcagaatggcccagagtaggtctttttttttttttttttttttttttaagaccgagtctcactctgtctcccaggctggagtgcagtggcgccatctcggctcactgcaacctccgcctcccagattcaagcgattctcctgcctcagactcccaagtagctggaattacaggcacctgccaccatacccggctaatttttttgtatttttagtagagacagggtttcaccctgctggctaggctggtctcgaactcctgacctcaggtgatccacccgccttggcctcccaaagtgctgggattacaggcgtgagccacatacccggctcagagtgagtcttaaaaggacaaaaagaacaaacttcattgctaatgctccagactgacccagctgtgaaaacagcgataccatcttacccttgccctttttgccaactctggaatcttgccaatgaggaacttaatcaaatgtgggttccaaaataggaactcattagcacaaattttgcaggatgcattcctcacttgcaggattttattatataataatcctaatgtttgtatggagagaaatgtttattggtagatttggttactttgtgacagcacaggttttttgagatggagtctcgctctgtcgcccaggctggagtgcagtggcgtgacctcggctcactgcaatttccgcctcccggcttcaagcgagtctcctgcctcaacctcccgagtagctgggactacaggtgcctgccaccacgcccagctaacttttgtatttttagtagagacggggtttcaccgtgttggccgggctggtctcaaactcctgaccttgcgatccacccaccttggcctcccaaagtgccaggattacaggtgtgagccactgcatcccgggcaacagcacaggtttttaaagatgaccatgtgctttatgtgcacatcggatgcaaagttgatgagcacagaatccttatggccaacataaggatttgcttcctggacaagcaaagcctgccactggagactgcttctgcgtctgtacacaggtagaagctggtctctgtgaatacactgttctttctgtgacttttacccaccccactgacgccaaaaaagtgattgcattctcactaattgttataacacatttaacctcctgggcccttgaaggaggcagcaccttgcagcccggggaggtcggtcctcagtgtctctggtcatgaatgttcagagtgagataggagaacctgcaagccacaatgtcctccccacttttcctgccagatgcatgtctggctattccccacctgcccaagcctctcttggcattgcttgtacatccccctccactatggagatctgtctaaggtgtatctcctcccaagaccagcttgaggcactctggtataacctgtagccaaagctgctctgatcaatcagctgtaggttacaccagagtacctcaagttggtcccgggaggagacacagcttaggcagatctaggtcaagtttctgttttcatgatctagccaggctgcccttgataatgtatttgagactttagtcattgcctgttctgagccatcacattacagagacaggcctaggcgccacctagcccttcattagtaagagtgcacttcctagagattctaggttcactgcagtgagtcaaagtagctgagagcagcgctaatgatttgcttggttggttgactgaaatctggtgtcctcttggccgggcgcggcggctcacacctgtaatcccagcactttgggaggccgaggcaggtggatcacgaggtcaggagatcgagaccatcctggctaacacagtgaaaccctgtctctactaaaaatacaaaaaaaaattagccgggtgtggtggcgggcgcctgtagtcccagctactcgggaggctgaggcaggagaatggcgtgaacccgggaggcggagcttgcagtgagccgagatcacaccactgcactccagcttgggcgagagtgcaagactccgtctcaaaaaaaaaaaaagatatctggtgtcctcaggagtggtctctgctgattgagattgatatgataccaaacttccctggtataatgtattatagaagaaagaatccacaggccggacctcagagcggagtgggaataacagaccagccagtcacctacctggtagcagcttataagttaatggcgaaggacctcatgaagggtgtaacatataaattgactcataattcagcgtataggtttgcctttccctgcccgcagtgctcctgccagcactgtcctccatggagtttcagaaagctgtgttcactgtcatagtatacacaacacactccagagcaagcaactcacagcaaaagaactgcggcatatgggctcaagccatggaatccattgatcttaccacgtaccccatcacccagaagcaacttgcctgatacaatggaattaccaagtaaacactccacaattatgccagctggaagacaggcccctgcaggatgggggtgccagcctacaggatactccatagcatttgaacaattcctctctagtgagaattcacaggtccagaaatcaaagtgtttttctccctattactttttttttttttttttgagacggagtcttgccctgttgcccaggctggagtgcagttgtgcaatcttggctcactgcaacctctgcctcccaggttcaagtgattctcctgcctcaacctcctgagaagctgggatttttgtattttttttttttttagtagagatggggtttcaccacgttggccgggctggtcttgaactcctgacctcgtgatctgcccgcctcggcctcccaaagtgctgggattacagggtgagccaccatgccaggcctccctattacatttaataactcacctgtgtttgagttctaccaactttagaggtcataattcccaagggtgaaatgcttccatcaggaaacataatcagttccactgaactggaagtggaggtttcccctgtggccatttggggcccttcctaccgctgagcaataggaaaagagaggtccctggactgcctgggatgactgatcctggttatcaaggggaaaggaggttgctgctacacagtgggggaaggggtgtatctagaactcagggggcccaatgccttgtaatacaatttcacagaaactataacaacccaataaaggcttcagaccctgcagaaatgatgatttgtgttttcccatcagaaaaagaccccctgtctgccaaggtgctggttgaaggcagagggaacattcaatgggtagtggaagaaagaagtgacaggcagacgcggtggctcacgcctgtaatcccagcattttgggaggctgaggtgggtggatcacttgaggtcaggagtttgagaccagcctggcaaacatggtgaaaccccatctctactaaaaatacaaaaattagctgggcgtggcggcgggtgcctgtaatcccagctacttgggaggctgaggcaggagaattgcgtgaacctaggaggcagaggttgcagtgagccaagatcacaccactgcactccagcctgggagacagagggagattctgtctcaaaaaaaaaaaaaaaaaaaaaaaaacgaaggcagttacatcaactacagctttgcaaccatggcagaaataactgctgtagcaaacatgggtatcttttcttgtttgttacaaatatgtatatgttaattaattcattatttcttttcttttcttttttatttagatggagtctcactctgttgcccaggctggagtgcagaggtgcaatctcagctcactgcaacctctgcctctcgagttcaagtgattctcctgcctcaggcttccgagtagctgggattacaggcgcccaccaccacacccggctaatttttgtaattttagtagagatggggtttcgccatgttggccagggtggtctggaactcctgacctcaagtgatccacccgcctcggcctcccaaagtgctggaattacaagagtgagccaccgcacccagtctatgtatttcctttttttttttttttttttttgagacggagtcttgctctgttgcccaggctggagtgcagtgttgcaatctcggctcgctgcaagctccgcctcccaggctcatgccattctcctgcctcagcctccggagtagctgggactacaggcgcccgccaccacgcccagagtattttttgtatttttagtagagacggggtttcaccgtgttagccaggatggtctccatctcctgacctcgtgatccacccgccttggccttccaaagtgctgggattacaggcgtgagccaccgcgcccagccctatgtatttcttttatagaaatgtttgtttatattttttctcttctggaggagttttttttgtttttttttgttttttgtgttttttgtttttgtttttgagatggaatttcactcttgttgcccaggctggagtgcaatgttgcgatctcagctcattgcaacctccatctcccaggttcaagtgattctcctgtctcagcctcctgagtagctgggattacaggcatgcaccaccatgcctggctaattttgtatttttagtagagatgggatttctccatgttggtcaggctggtctcaaactcccaacctcaggtgatccgcccacctcagcttcccaaagtgctgggattacaggtgtgagccaccacgcccggcctggagtctttttgataaataacattttcctagacaattatccagtcttttaaatttggtttgtttgttgttgttgttgttttgtcacccaggcttgagtacaggagcataatcttagctcactgccacctctgcctcccaggctcaagcaatcctcccacatcagcctccaaagtagctggaactacaggggcaagccaccatacccggctaatttttgtagacacagggttttgccatgttgtccaggctggtctggaactcctgggctcaagtgatacacctgcctcagcctcccaaagtgctgggattacaggtgtgagtcactggacctggcctgttttggtcttagttctgtgttaaatatattaaacattcactgccttccttttgctaaaatttacttttttgctagcccttagttgactcgagtttatcctccagtaatttcttcaagaagggctcatgagaactatatttcctaagatcatgcattctcaaaattgtctacggtttagagaataaagacaagccacagactgggagaaaatatttccaaaacacatatctgataaagagttgtatccaaaatttacaataaactccaaaaactgaacatcaagaaaataaactacacaatttcaaaatgggcaaaatatctgaagagacacctcaccaaagaaggcacatatatggcaaatagcatatgaaaagatgctcagcgtcatatgtcattagggaatttaaaattaaagtaacatttggatggtcaggcacggtggctcatacctgggtggccaaagctgggggatcacttgtgcccaggagttcgagaccagtctgggcaacatagggagaccaccgtctctacaaaaaaacgttctttaaattagccaggcttggtgccacacaccatggttccagctacttgggaggctgaggtggaagggttgctggaggacaagaggtcaaggcagcagtgagcagtgatcgtatcactgcactccagcctgggcagcagagtaagactctgtctcaaaaataaaataaaataaaataaaataaaataaaataacagttgaactctgctacacatctattaaaatggctaaaatccaaaacattgacaacaccaaatgttggcaaggatgtggaacaagagaaactctcattcattgctggttggaacgcaaaatagtataaccactctggaagacagtttggaagtttctaataaagctaaacataggcttaccatacaatccagcaatcatgctcctaggtatttacccaaaggagttgaatgcttatatccccatgaaaaccccaacacaaatgtctacagcagcttttcataattgccaaacattggaagcaaccaacagatccttcagtacatgaaatgataagcaaactatggtacatccatgcaaaggaaaattatccagctaaaaaagaaatgagctatcaagccatgaaaagacatggaggaagcttaagtgtatattgctaagtgaaagaggtcagtcaagccgggcgtggtggcgcatgcctgtaatcccagctactcgggaggttgaggcaggagaatcacttgaacccaagaggcaaaagttgcggtgagccaagatcacaccattgcactccagcctgggcaacgagagcaaaactctgtctcaaaaacaaacaaacaaacaataaaaaacaaaaagaagaagtcagtctgaaaaagctataaattatatatatccaactatattatactatattctggaaaggcaaaactattgagacagtaaaaagatcagtggttgccagaaggaggggagaggggagagggaaaaaaactttatggtcttttaatgaaatccctgactcatgttttctttccttgactacttgctccatctcttccagcattcaacatgggtctgcagacatccaaggctagcctgatttttatcccctaaaagaaaaaaggaatttatcttttttcctggctgctcataaatttctttatttttaaaactcaataactttactaggccaggtctcaacaaaaacattcttgatcagttttccctgacatctagctttctctttcatcatagattcaagcctcttttatttcaggagaactttcttttctttttaaaggagagacagagtctcactatgttacctggtctggtttcgaactcctggcctcaagtgatcctccctccttggcctcccaaaacgcctgggttacaggcattagccaccatgcctggccaatttcaagaaaactttcttgaattatatctttagctgtatgttttatctattgttttggttttattttttagagatttcaactatgcatatattgcatatttaatttcctttgcatcttatatatatgtatatatatacataattttcccatattgtttttaatctaccatatttccacttcattggttcacttttctcatttctattctttatgtcctttacagtgtcttccatagtaactgttcttatttatactccctccaatttcttttttcttttttttcttttttttgagacggaatttcgctcttgttgcccaggctggagtgcaatggtgtgatcttgactcaccggcagaggcctcccaggttcaagtgattctcctgcctcaccctcccaagtagctgggattacaggcatgcaccaccatgcccggctaattttgtatttttagtgagacgaggtttctccatgttggtcaggctggtcttgaactcccgacctcaggtgatccgccctcctctccctcccaaagtgctgggattacaagtgtgagcaaccatgcccagccgggtttttctattctattgcatcgtcaggttgcaaattttccaaatttttatgcaatgcttcctcttgaatgttttgctgcttagaaacttattccaccagatacccaaaatcatctctcttaagttcagagttccacatatctctagggcagggagaaaaagctgccagtctctttgctaaagcacagtaagagtcacttttgctccagttcccaacaagttcctcacccccatctaagaccacatcagcctggactttatcatccatataactatcaacattttggtcaaagacattcagtaagtctctaggaagttccaaactttcccacattttcctgtcttcttctgagccctccaaactgttccaacctctgcccactacccagttccaaagttgcttccacattatcagctatctttacagcagcatcccactctaccagtaccaatttactgtattagtctgttctcacactgctaataaagacatacctgagactaatttataaagaagaagaggtttaatggactcacagtttcacatggctggggaagcctcacaatcacggcagaaggcaaagaaggagcaaagatacgtcttatatggcagcaggcaagagagtctgtgtgtcggaactcccatttataaaaccatcagatctcctgagacttattcaccatcaggagaacagcacaggaaagacctgcccccatgtttcaattacctcccactgggttcctcctaccacatgtggggattatgggagctacaattcaagatgagatttgggtggggacacagccaaaccatatcatggaggttgcagtgagccgagatagtgccactgcactctagcctgggtgacagagcaagactctgtctccaaaggaaaaaaaaaaaaaaattgtaagatgactcaccatgggggacaagtagatcctcaaagtttggcccaaattgctgctttggaaaagaaacagtaagtgcatagatactttgttatgacgtgctgcatggaaaagaactaaatgcatttggctttaagtatgaaatatttttggtatcttggtgtctactttcttttacagttggttttagattacagaaagagagctatttatacctgttattattatcctgacaaaaatgacagcataagcactataattgaaaaatctgaatatagaatgaatttatgttaaaagtgtctgttgtgctaaaggcattgtatttagtgggaagggctttggggaaccaactggtagaaatacatcatggaacggttcattttagcaaagcattaagatattgcccacagaatgttttccaccatacaggttatgcattcagtggctgtttcaaaggttttatttatggaaaagcaagcgactttaggtggggagggaagaagttcttgagttcttaattcatagaaaaggagccatagctctttgtattgattctaccatttctttattcagttaggatgaagtataaccctttagccagaatttttggctaggcacagtggctcacgcctgtaatcccagcactttgggagaccgaggcgggcagatcacgaggtcaggagtttgagaccagccagcccaatatggtgaaaccccaaatctaataaaaatacaaaaattagccagacgtggtggcacgcgcctgtagtcccacctactcgggaggctgaggtggaagaatcgcttgaacctgggaggtggaggttgcagtgagccgagatggtgccactgcactccagcctgggtgacagaacaataccccatctcaaaaaaaaaaaaaaaaaaacagaatttttgagaagtattattccaggcgttcagaactgagaaagttcacacataagaaatacattctttggccgggcgcggtggctcatgcctgtaatcccagaactccgggaggctgaggcgggcggatcacaaggtcaggagatcgagaccatcctggctaacatggtgaaacccatctctactaaaaatataaaaaattagcccagcgtggtgatgggcgcctgtagtcccagctacttgggaggctgaggcaggagaatggcatgaacccaggaggcggaggttgcagtgagccgagatcttgccactgcactccatcctgggcgacagagcgagactgcctcaaaaaaaaagaaaaaaagaagtacattattatcgtcatcaaaagttaaaaaaaaaaaagttatgggatcaatggattggatagcaatgtcctacgccccaccatttactcatcttttctcctcctctgagttgaaactcctccttggtgagctactgaattcctatatgcacttgcatgtaggagatggctactgttggctttccctcccccacatcccaccgccaacaccgcctccacgtttctgtgaactctcccctccttcgcatgcggtcaccgcagcagccatggcatgacctttggctgcaatcgatcaggccagtgttagtcagctgatccaacagagccaatcagtgtctttcccactacttgggagcgggggggaagacagaaagagagagaaagagaaagagagagaaagagaaagagagagaaagagaaagagagagagaggagagactattaggtaatcgccctggatggtcagttttctgttgaaggcgcctactccatatcttttcctcttcatcactctgcatttctgaatttcatcctatactttgtgctcaacttttgtgtgctcttaaagtcagctttatcctaagcaaatctgtatctactttaaaagactgaaaatagaaaaaaaaatctttgccaaattcttcagagactgctgtatttacatatggtttaaaatcaaatgccataagaacttcttgattaaactattccccattattacattctttatctcttctacagcatcatttttgaaaatacttcctctttgaaatactgcatatatgttcttgtgcatttgtttcacctttcaacactcaattcaggtgtgttaaaataaatctaacactttaattttaaaaaagaactgggggagaatctgcaagctataaaactcaggagtttgacattttgggttggatgaaaaaattaaaaaccaaaaaaaaaaaaattcaggagtgtcgtaaagatttgaattgaggccgggcgcggtggctcacacctgtaatcccagcactttgggaggccgaggtgggcggatcacgaggtcaagagatggagaccatcctggccaacatggtgaaacccagtctctgctaaaaatacaaaaattagccaggcatggtggcgtgtgcctgtagtcccagctactcaggaagctgaggcaggagaatcacttgaacccaggaggcggaggttgcagtgagccaagattgtgccactgcactccagcctggtgacagatcgagactgcgtctcaaaaaaaaaaaaaaaaaaaaagatttgaactgaaaagcagagaagccagtccactataagaggaaaaagtgagacagagcctctgaacctctcaaggaggtagagctcaagcacagagagaacttcccaggtccctgactgaaaaagcacccatccccattctgacacaaggcccagtagcaacctggcccagagacccctgagatattctgctgtctttctgataaactcccttctttttttaaacaattttatttcaatagcttttggggtacaagtggcttttggttacattgatgaactgaatagtggtgaagtctgagatttcagtgcacctgtcacctgggtagtgtacgttgtactcaatatgtagtgtttaattccacacccctgcttttatccaccaccccactcagcccttctgagtctccaaagtccatcatagctctctgtatgcctttgcgtattcatagctcagctcccacttatgagtgagaacatacggtatttggttttccattgctgagttacttcacttagaataatggcctccagcaccatccaagttgctgcaaaatacattatgttgttcctttttatggctgggtagtattccgtggtgtatatataccacatttctttatttcttttttttttttttttttttttgagatagagtcttgttctgtcgcccaggctggagtgtagtggtgcaactcggctcactgcaacctccgcctcccaagttcaagcgattctcctgcttcagtctcccaagtagctgggactataggtgcacactaccaagcccagcaaatttttgtatttttagtagagaggaggtttcgccacgttggccaggctggtcttgaactcctgacctcgagtgatccacccgcctcagactgccaaagtgctgggattacaggcatgagccaccacgcccctacaccacattttctttatctacttattgcttgatgggcatgtaggttggttctatatctttgcaattgtgaattggcccacaataaacatatgcatgatgcatgtgtctttttctttcttttcttttcttctcttttttttgagacggagtttcgctcttgttgctcaggctggagtgcaatggcgcaatctccgctcaccgcaacctccgcctcctgggttgaagcaattctcctgtctcagcctcccaagtagctgggattacaggcacgtgccaccacacccagccaattttgtatttttagtagagacggggtttctccatgttggtgaggctggtcttgaacttccgacctcaggtgatccacccacctcggcctcccaaagtgctgggattacaggcatgagccactgcgcccaggccatgtgtctttttcatataacttcttcccttctttattaattaagctggttctcactgaatttctgtcacttacagccaagacaccctcaactaattccctggatccgtttctggagtctattccatgtcactgactcctctctccatccctatgccagtgccaagtgtgttttaattatgtagatctattgtggggaaaagaaagagagatcagattgttactgtgtctatgtagaaaaaggaggacattagaaactccattttgatctgtactaagaaaagttgttcggctttgagatgctgtgaatctgtaactcttgtctcaaccctgtgctcacaaaaacaatcccttaaactcaaagtttaagggatttagggctgtgcaggatgcactttgttaaaaatgtgtttgcaggctgtatgctttgtgaaagtcattgccattctccactctctattaaccagagacacaatgcaccgcggaaggctgcagggacccctgcccaagaaagcctgagtatcgtccaggtttccccccacggagatagcctgagatatggcctcctgggaaaggaaagaccttacatcccccagcccgacacccgtaaagggtctgtgctgaggaggagtagtgaaagaggaaggcctctatgaggttaagaggaaagcatctgtctcctgcacgtccctgggaatggaatgactcggtgtaaaaccgagcatacattctattctgagataggagaaaaccgccttatggctggaggcgagacatcatggtggcagtactgctctgttactctttactgctctgagatgttcatgtaaagttaaatataaatgtagcctacgtgcacatccaggcacagcacctttccttaaacttatttatgacacagagtcttttgttcacgtgttttcctactgaccctctccccaccatcaccctatagtcacaccgcattcccctcgccgagatagtaaagatagtgatcaataaatactgagggaactcagagaccagcgcaggtgcaggtcttcacttgctgagtgccagtcccctgggcccacttttcttcctctatactttgtctctgtgtcttatttcttttctcagtctctcatctccaccttgggagaaatactcacaggtgtggaggggtaggcccccttcaacctatgatatattttaacatctgataggacaagtccccttattattgttcttttaaattttttctgctggctactctcacatgtttagtcttctagatgaatttaggctcattttgtccaattgcaaaaatacattgcccaggaattttcatttgcataaccttgaatttatagctcaatctagggaaacttgacatcatagcaatatggagacgtcatagtcaagttgactatatgaagtatttttatggccttcattatagttgtttttttgttttgttttttttttttgagatggagtctcgctctgtcgcccaggctggagtgcagtggcgccatcactgcaagctccgcctcccggattcgtgccattctcctgcctcagcctcccgagtagctgggactacaggcgcccgccaccacgcctggctattttttaaaatatttttagtagagatggggtttcaccgtgttagccaggatggtctcgatctcctgacctcgtgatccgcccgcctcggccttctaaagtgctgggattacaggcgtgagccaccgcgcccggcccattagagtgttatggttgttctcatccacatctcacacgtttcttcagttcattcttgggtgttttatggtttggttgctattgtgcattcccagattcttactggagattgggtgtggggtcttacagtaggcacctctggtgtcccacgttgcacccccttgacccgctgatttcagccacaacaaaagtagacagttccatcagaactcaaccaggtccttgtgctgaaaatacccctcctcaagcatgagccacactctctgccccagggctttctctagcaccaatagaagcttgctcagccaatacagcacagctcagacctgctggggagttcatgcccacggggaatggaagctggtgggtaaatcctccagccacccctccttcagatcaaccattctgtatgcttggagatgctggtgagccccatcacccaaaatgtgcagcagccttgacaatgcaccccgattgggcttgcctccttccccgtctcactccctcctctttttcactcctgctttctgggatcagctcccaagaaaactatcttcctcaagtccttctctcaggctctgcttttgggagacacccaaactaaggcagacctcctatgggattctggctcatagtgaggcaattgagttttataggagaatcacttgaaccagttggtttccccattgccaagaaatatcacactcactctacatagctgttgagcagagctgggaccagtctggcctggagtagacacacaccgccccccccaccccacacacacacacacacgggtcctgctgtaaccctgcattcttcagccttaggtgtggaacctctctctaatacctctaagaagcttgtaactccttcaaagtactgcagtgtccccctatctgcctcaccacaaattcagactcctccctttatcccccaagcacagttaacttgaagcaataaagaagaagattcgggccaggcccagtggttcgcacctgtaattccagaactttgggaggccaaggcgggcggatcacctgaggtcaggagttcaagaccagcctggccaacacggtgaaaccgtgtctctactaaaaatacaaaaaattagccaggcgtggtggcaggcgcctgtaatcccagccactcgggaggctgaggcaggagaattgcttgaacctgggaggcggaggttgcagtgagccgagattgagccactgcactccagcctgggcgacagagtggaactccatctcaaaaaaaaaaaaaaaaaaaattcttacacatgacctcccaactatttctacaaatttgcatcatacactcaagactcaatgttctgggagagattgccaggtgggtgatacccatggcacatgccacccccctcctgctacactggggggtgggggagagatgaagaattcggttctgtggctactggtgccccctgaagtatgcacattataaggggctctctaaaatacaaatcatgaatgtttactataatattctttgcccatttctccaatgggttgttgttgtttttttcttgtcattgtgtaggggttctttatagtctggatattaattaactgttataaatattgcaaatatttcatctaagtctattgcttttttttttttttttttttagacagggtctcactctgttgcccaggctggagtgcagtggtgcaatcacggctcactgcagctttgacatttcttggctcaggtgatcctcccacctcagcctccagagtagctgggactacaagcacacgccaccacgcccaactaatttttgtatttcttgcagagacagggttgttgcccaggctggtctcgaactcctgagctcaagtgatctccctgcctcagcctcccaaagtactaggattacaggcgtgagccactgcacctggcccctcttttttttgtttcttaccattttttttcgttgttgaagaaagcataagttggctgtaaaatcttccgccttctggatctgacggcatgcatgcctgtgtggatgttcccctcccactgcatttccaataagctggtagttactgctaaccagattcagttcaaggttctctgacaacaacgtcgcgcaggcggtgctgtggcgtccctaccgcatcacaatagtaagtacatagtgtccgcaaatgtacaaaaactgacctcctccttcctcatctttttattctgattttcttctcaggatcgaccttcagaactactgtgacaatgagttccttctcttgatcctgtgtttagtggaaatatttatcatctctctccattaagggtgatgtcaggtgtgggagttgagatgcacctatgcgttgctcctgctggacagtggtgaggtgtgacttgctcccatcctcagttccaggcgcgctctcggcctccatatgttcaaggcccttccttattttcatgtttcctcttcatcctcattgcacccttgaattcccctcccttccttaagaacccacttgaggccaggcacagtgactcatgcctgtaatctcagcacattaggaggccaaggtgggaggatcacctgaggtcaggagttcgagaccagcctggacaacatggcaaaaccccatccctactaaaaatacaaaattagccgggcgtggtggcaggcacctgtaaacccagctactcagaaggctgaggcaggagaatcacttgaatccaggaggcagaggttgcagtgagccaagatcacgccattgcactccagcctgggcaacaagagtaaaactctgtctcaaaaaaaaaaaaaaaaaaaaaaaaaatccatttgaataggtttgatgtatgtccttgaaaatagctggatcctggaaaattacaaagtggagttgtgtgcataggcttttgacattaatcaatgttgtcgtgttctaaactgcattctgttttctacttctcatttaatgctgatattaggtctattcatgttgttctgtgtatatctagtcactgttttttgtttttgttttttttcgagacggagtctcactcactctgtcacccaggctggagtgctctgcctcaggcttccaaatagctaggactacaggctcctgccaccatgcccggctgattttttgtatttttagtagagacggggtttccccatattggtgaggctggtctcgaactcccaacctcaggtgatccgcctgccttggcctcccaaagtgctgggattacaggcgagtcctaaatgctggatagtagcccatcagacatgtttcccgcattctgctctcagtaggcacccaggctgcctccagctccttgctacccaaacagcactgcagtgaacatcttcacagtgccccataatggacctgtcagagattctctctggtgtatgtatctggaagtaggattttcagggatcatctttttttttttttcgagacggagtttcactcttgtcacccagactggagtgcaatggcacaatcttggctcactgcaatctctgcttcctgggttcaagcgattctcctgtctcagcctcccaagtggcaaggattacaggtgcccgcccccaagtccagctaatttttgttgttactgttgtatttttagtagagacggggtttcactgtgttgaccaggctggtctagaactcttgacctgaagtgatccacccacctcggcctcccaaagtgctgggattacaggcatgagccaccatgcccggccgataatatgcatttttttttttttttagacaaagtctccctctgttgcccaggctggagtgcaatggctcgatctcggctcactgcaacctccacctcccgaattcaagcgattctactgcctcagcctcctgagtagctgggattacaggcgcacgccaccatgcccggcttattttggtatttttagtagagacaggatttcatcatgttggtcaggctggtctcgaactcctgacctcatgattcacccgcctcggcctcccaaagtgctgggattacaggcgtgagccatcgtgcccgtcctgatactatgtattcttaattccagtaaatatcttgcagaatggctattccaatttatcctcccatcagcagcttctcccacaaccttggcagcaattgacttcctcttaatgtttgtcaattggatgggtgtaaacagatggctcactcgtgtttgatttctctagttagtcactagtgattgtaaacatgtcttcatatgcacattagaaccccaggcttcctcatctgtgaactgcttgtttatacctgatgccacttttccaataggtttcctgtgtatttcttcatcttggtctccttctgtgttgaatgtcttccatttgtccttccagatccacactctatccttctccatgttgttctgtggcctgggaggctgagctgtatgactgcatcaaatcgctcccttgccatctggcttccagccctcttccaggaagagagggaagtgaggatattaactccccggcccctccctgtagagtggctgtgggttagctgccccctgcaactgagtatcacagctcctgttgggaggccctctccctgcggtcctggaggtggtaacagctccccactctgggatgcctaggttcttgctccatcttgtggcttccctaagcctgttcacacctttgcagagagtccctatattatgaaatcttgcacttacccatttttgggtgtgccatctgttgcttgctgggagcctacctgatacattgctgttgaactgaaatttatcattttcatgcaatttcacaaattttttttggctttttggaatgtgcttcggaggccttatttaacaagctcttcagccgggcgcgatggctcacacctgtaatcccagcactttgggaggccaaggtgggtggatcatgaggtcaggagatggagaccagcctggccaacagggtgaaaccccgtctctactaaaattcgaaaaattagctgggcgtggtggcgcatgcctgtattcccagctactcaggaggctaagaaggggaattgcttgaacctgggaggcagaggttgcagtgagccaagatcacgccactgctctccagcctgacgacagagcaagactctgtctcaaaaaaaaaaaaaagaagaagaagaaacccttctatactcttagtagtatagatttttctttctttcttttttcctactagttctgtaattttatgttatatgtttaggtcttcaatctatccaacatccacctttgcctgtgatgttaggtatgaatccagttttacttatcttcatagagtgagccagttttcccaataatgtctttcttctaccaatttgagatgttacctttattgtatattaagttcccatgtaggcacagttctgtctctcggctctttattctataacattggtttatccgtctattcttgtatcattactgtgctatttttattactatggctttgtaatatattttaaagtctaataaggctagttcccccttcctccaatttctcctttttttcccatattgacttttatcttgccacatatattttttttaaagttgttgcattgcttttaaaaatccaattgaggtcgggcgcagtggctcactcctctaatcccagcactttgggagtttgaggcaggtggatcacttgaggtcaggagttcaagaccagtctggccaacacggtgaaaccccatctctactaaaaatacaaaaattagctggacgtggtggcgggcacctgtactcccagctacttgagaggctgaggcaggagaatcgcttgaacctggaggcggaggttgcagtgaggtgagattacaccattgtactcccacctgggtgacagagggagaatccatctcaaaaagaaaatcaattgaaattttatttttattgcgttgaatgtatatgttaatttggaaagaatttaagtttcttcttgtatgttcttcatgtgttattgtggtgatagactaatacacctgccgaagcctcttattaggtcgaattgtttgtttgtttgttgatggtgttgattttctgtataggtgagcatattgttttatctcttcctttccaattcttacaacttttaatgtctttttctgtcttgtgcagtttggctaccatgcccaggatgatgctgaacagcaataatagcactataacggaggcttctaattacccctaataccaattatccccttcttgctacaccagaggtccagaaacatctcctataaagggccagatagcaagtattttaggcttaccaggtcatacagtctttatcataactactcaattctgctgttgctgtggtcataaatgacatgtaaacaaacaggcatggctgtgttccgataaaactttatttacaggccgggatccgtggctcattcctgtaacccagcactttggaggcgaaggcgggtagatcacttgagcacaggagttcaagaccagcctgagcaacatggtgaaaccccgtctctacaaaaaaatacaaaaattagcagggtatggtggcttgcgcctgtaatcccagctacttgggaggctgaggcaagaggatcacttgagcctggaaggcagaggctgcagtgagtcaagatccagaggctgcagtgagtcaagatcacgccgctgcactccagcctgggcgacagagccagaccttgttgcaaaaaaaaaaaaaaaaaaaaaaaaaaaaaactggccaggtgtggtggctcacacctgtaatcccaacactttgggaggctgagatgggcagatcacctgaggccaggagttcgagaacagtctggcgaacatggtgaaaccccgtctgtactaaaaaaaaaaaaaaaagaaaaaatacaaaacattagccgggcatagtggtgcacgtctgtaatcccagctacttgggaggctgaggcacgagaactgcttgaacctgagaggtagaggttacagtgagccgagattgtgccattgcacttcaacctgggcaacggagagagactccgtctcagaaaaaaaaaaaaaaatagaaaaagaaagctttatttacagaagcaggtgagggccaaagtttactgactccttctctacaaaatagaatcctgtgtttttagcaagaatgtggcctcatggaataaagttcatttctcagccccatttgcagctatctgtggccctgggactaattctgatcaaagagatataaagtgaagtgatggaagtgtctgcatagacagagagagaatgcgccattctccttcccttttcccctttctcttgtccggaatgtgtcataacaggaggggcagacatcttggaacatgtgatggaagccacagattgaaacgatggagcaacaacgtagaaacagctagagtccagaaagatttcatcataaatcagagctgaacttttgctgagtgttttttctgcattgtgtaattgttttcttttgtacacatttaatctatttttctgtactctctaaatctattatattaacagatttttcttatgttaaatcatctttgaattcttggcatctatactacttgaacatgttaccttttttattttttattttttgttttttgtttttgttcttgttttttgtttttgagatgagtctggctctatcgcccaggctggagtgcagtggcgcgatctcggctcactgcaagctctgcctcccgggttcacgccattctcctgcctcagcctcctgagtagctgggactacaggcacccgccaccacacccggctaattttttgtatttttagtagagacggggtttcaccatgttagccaggatggtctcaatctcctgacctcattatcttcccacctcggcctctcaaagtgctgggattacaggcgtgagccaccacacctggccatgttatcttttttaatgctgcatttgatttgataggctaatatctgataaaagaattttaggccgggcatggtgtctcgtgcctgtaatcccaatacttgagggcggatccaagcaggcggatcacttgaggccaggagttcgagaccagcttggccaacatggcaaaaccccatctctactaaaaacacaaaaattggctgagcatggtggctcatgcctgcattcccagcactttgggaggccgaggcgggtggatcataaggtcaggagttcaagaccagtgtagggagaccccctaaaactattgctatggaataaagatgaaatgctcctaattattgtaaatacaaaattgcatgcagaattgtgtaaagacaatgccaggttgggctgccagaatgagccaacagcgcatgatgtgcttccccctgcagaaagcctataaacggacatgcagtcagggaggtttcatatctcccagattcctatcccagaaaagcagatgttcatagctctgggagtggaatgcgacccttgtggagagcctataaacggacgcatgaagggcacctgttcatatggataaggtagggttataaatgcccttatcttgccacggctcttctaggcctctttagggttaaggcatactcccttctgagaatttttggtctaactggttgtctagcttcacatcctgtttctatggattgtttgtaaccagcttttgctgcaactgttactgctgattaatatcttgctaatcataggttagggatagactgtgtttctgttttaaggctctgttagaaattgctgacgcacacactatattgtatattcttatctctgtacactgtacttctgcatactgatgttatgttaaagaattacttcatccccaatgtgaccatctcacctcataatcaaacgaccctaaatccctcactaacctacccccaccctcactaaacttcataacaaatgctggtatatccagtgcattggcggcatcacaggaccaaaaggcggtgacgcccctggacccagctttcactatcttgtgtgtgtcttttatttctcaacctgccaatccacctgggaacaaagaaagagccattgcgggctgcattgcaatgcgttgcaactgcgggctgctggccagatcccgcaatagaccagcctggccaacatagtgaaaccctgtctctactaaaaatacaaaaaattaaccaggcttggtggtgggcacctgtaatcctagctacttgggaggctgaggcaggagaatcacttgaacttgggaggcagaggtgcagcgagccgagattgcaccactgcacatcagcccaggtgacagtgtgagactctgtctcaaaaaataataacaataataataataataattagccgggcatgatggtgtgtacctgtaatcccagctactcagaaagctgaggcacaagaattgcttgaacctgggagacagaagttgcagtgagctgagatcacaccactgcactccagcctgggcagcagaacaagactctgtctcaattaaaaaaaaaaaaagaattttacattcctggtcattataatgaaaagcctccatttggaaattgttaaagcttgattaatggcccagtatttgctcaattttttgagaatgtctcagtatacttgaaaagaacaggtattccactgggtatgggggcttatggctgtaattccagctgctcgggaggctaaagcaggaaaattgcttgagtccaggagtttgagacctgcctgggccacatagcaagacccttatctcaaaaataaaagggggggtattttgtatttgatgagtacagtgtactaaatgtgtccattagatcataatagttcgatctgggattcaaaacatctgtatccttattgttttgtctgcttgatctatcaattagtgagatattttataatctattatgaatgtaaacttgtctgttttcttatacctctaaaatttttgtttcacgtattttgtggctatgttattcagtgcatgcatatttagtactagtgtatcttcctgttgaattgaaccttttatcattaggaagtgatcctctttatctctaataatactttttgttataaactatacttcatggctgggtgtggtggctcatgcctgtaatcccagcacttagggaggccaaggcgggtggatcatgagatcaggagttcaagaccagactgcccaagatggtgaaaccccgtctctactaaaaatacaaaaattagccaggcatggtggcgggcatctgtaatcccagctactcggcaggctgaggcagagaattgcttgaacccgggaggcagaggttgcagtgagccgagatggtgccactgcactgcagcctgggtgacagagtgagactccatctcaaaaaatatatataaaaaataaaaataataaaaataaaataaaacaaagtgtacttcatatgatagtcatttggttggaatttgaccaatgtgtctttcatcattttgcttccagcctgtttcagatgtggctcttgggcatatagttggattttattttttattctgtctggaaagtttttttgtcttttaacaagataacttggtattttgcatttaataaaatccgcaacatatgtggattcataaccaaccttttgtgttttttcttatctacctcttctgggtttttttctcctttattctcttcctttagtttaatttttttcttcgtttttcctgcttataagtttgaaagttataacccagcttctaagagatttgcctaaaaattacaataatggcaggaaaaacactgtatttgctttactgttttaaatcaggaagtgttatgtaattatatcccctatgtctctacttacgtaatctttctcctttctaaagttatgtctgtgtctcctttttttctccttcatttttattttatttgcctttttttttttttttttttttgagacagagtcttgctctgtcaccctgtcacccaggccggagtgcagtggcgaaatctcggcccactgcaacctccacctccctagttcaagcaattctcctgcctcagcctcctgaatggttgggattacaggcgcccaccaccacacctggctaatttttttgtatttttagtagagatggagtttcaccatgttggtcagactggtcatgaactcctgacctcaggaaatctgcccatctcagcctcccaaagtgctgagattacaagtgtgagccaccatgcccggccttatttgccttttttaagcatcaaattttactttttttgatcatatctatatttttattttctagttcattatttctgcttatagttttataagttcttttcttctactttaggggatttatcttattctgtttcaagtttcttgagttgaaacagcatatttcaagtcagcctttcttgttttttagtaaaagtgtttatcttcgagaccagcctgaccaaaatggtgaagccccgtctctactaaaaatataaaaaattagtcaggcgtggtggcgggtgcctgtaattccagctactcgggaggctgaggcaggagaatcccttgaactcagaaggtggacattgcagtgagacgaggtcacgccattgcacttcagcctgggcaaaaagagcaaaactccatctcaaaaataaataaataaataaaaataaataatagaagtgcttatctctacttacattttctcccgagaactactttgagcatcccacggtttcagcaaatgcagtactcttgtagtgtatttctaaatcacttgattttttcatttcgattttctcttaaactcagaattacttaggcagtaatacaaaaaaagatggtgagaaaattatatgttggtagatctcttcttggctgtactttcacgttcatttctaactttattttactgtggtcagagcattgctcctcttaggaatcacttgaggtcttgtttatgggtgaatactttggcaatttttgttcacagttccatgtctgaatcggtttgtcctaactcccatccttggttgttgattctatccgctttgttgcttctgttccgcagtactggttttcctagtatgtttggtgattcttggttgtgtgttcgttgtatctgctacctgtctatgaacactgcttctgtttgctgtaatgaatgcaaaggacaccagtgagtttcattcgaagttgttgaagcactcaacaaattcgggtggttctgccgggggcagtggctcacgcctgtaatcccagcactttgggaagccgaggggggcagatcacttgaggtcaggaattcgaggccagcctggccaacaatggtgaaacccggtctctactaaaaatacaaaaattagccgggcgtgatggtgcactcctgtgatctcaggtactcgggaggctgaggcaggagaatcacttgaacccggggggcagaggttgcagtgagctgagatcgtgccattgcattccagcctgggcaacagagcaagactccatcttacaaaaaaaaaattcgggtagttctcctcctgggggtattgctccaagtaggatggcctccagtaagatggcttgtttacagctgggacacagagaacaataatttgcccaaactcacgtatctgtaaataacaaagtctggccattctggcccaaagcccacacagttctcatgatgccacagcacccgctaaggcttcgtaatgccaaccagcccactcctgcttccgaatccccaataaccagacaactaacagaaggtttaggtatatttctttttactcttaaaaaaaaaaagttcacaatgataacctgcaaactgcagaaagcgccacgggtttcaagctcctcaccttcggaacatcaccctatccttccccttcccttaaaatcctagatgaaaattcccgagaaagcagaagaggcccccagatgggcggattcccaatcccggacccctgcggcaggtcgaggcattgaagaaataaattaaaggagaggtggctcctggctggccttgtccagctctgtctcgcagacccagcggtagggcctctggcagacgtcgtcgttccagcggccgtcgtcggtgaagtgggcacagtcctcgcctcctccgagcccgtggccgtaccagtcgtccggctgctccggcctccagttcctggggacagagccagctgtgggccccaggaggtcggatccgcaggcgggtcgctccagactcctcagcccagggccccagggcgcgaaggcggccggacccaggccgagggagggcgcgcactcacttgaagcccgtctcgtagtccgtcccgtccacccacttccagggcccgttttggtcgtggaggcccatccaggtgttcacagggcctatgtggtgctggacaaatttctgaggagagagaaggcgggtggtgatctctccgaggccagccagcctcccagaccctccgggtcctcacctgctcctcccaggacgtgaccaccaccaggtgcgcgtcctccagccggcagtagttgtcggcgtcagcccaggccttcccggagcgagagaaccagtagcagctgcgctcgtgctccacccagttgaccgggcagcaggtcctttctgagcctgagcgggagaaacggggcgcaggggctaagcgctgcccagagaaggggggaggcagagagcgggccgggctggcctccttaccattgccctggagcgccgccatctgacagctcaggctccgcaggtcagacacgaactgcttcacgtggagcagcaggctggagtgatctggggagaccgggcggaggggagcgggaggagatgcggaaaccacggggagggaaacgggaaacgaggtcagccctacatcctcctgctgggacccgaacacccgtcgcattgccacaaacagcagcggagttggcctgagagacccccatacacacacacacacacactcctacacacacaacacacccttacacacacactcacacagacacacaacacatcctaacacacacacacagacaatatacaacacacacacacacaacctaacccacatacacacacacggacaacacacaaaacacaacacatacaacacaccctaacccacagacacaaacgcagacaacacacagagacacacaacacaccctaacccacatacatccacaacacacacaacacacataacccacatacagacaacacataaaacacacaatacagaacacacaacacaccctaacccacatacacaaaacacacccacagacacacaacacacccttacacacacatacatagacacaacacaccctaactcacatacacactcacacaacacacacaacacaccatacacaacacaccctcacacgcacaacacaccgtaacccacatacacagacaacacacaaaacacacaaacacacaacacaccctaacccacatacacacaacacacacaaaacacacacacaatacaccctcacgcataacacaccttaacccacatacacacaacacacccttacacacccactcacacacaaaacacccacaacatacaccctcacacacacacacggaacacaccctaatctacagtcactacacacacaacacaccttcacccacgacacacacaacacaccttcacccacacacacacacaacacaccctcacccaaacacacacaaaaaccacaacacaccctcacacaggcacacacaccctcacccacatacacacattcacacaacgcacacccacacatacaacacaccctcacccactacacacaccacacacactcacccacaacacacatatactctttcacacatgcacacacaatgcacattcacacaacacgcacatacacacactcacatgcacttacacatatacttacattctcacacacgcaacacactaacacacacgttctcacatacactgacacattctcacacacataaacacagactcacattcgcacacacacccacactccctcattctcacacacataaacacacagactctcccactcacaaacacccatccacactccttctcattttcacacaggctctcacacacacacacactccctctcattctcacagacacacactcagacacacacacccatctcattctcacacacactcccactcctcacacacagtctcacagacactccatctcattctcacactcacagacacaatccctctcattcccccacacacgcaacacacactaacacacatacacacgttctcacacacatacactgacacattctcacacataaacacagactcacactcgtacacacacccactccctcattcacacagactcacacacccatccactccttctcattctcacactcacacacactccctctcattctcacactcagactctgtcacacacacacccatctcattctcacacacagacacacaccccatctcattctcacactcacacacaccccatctcattctcacactcacaaacacacacacactcacagacacacacaccccatctcattctcacactcactcacacaccccatctcattctcacactcacagactcacactcagacacaaacacccctcattctcacactctcacactcacagacacacacaccccatctcattcttacactcagactcacacacacctcattatcacactcacagacacactccgtcattctcacactctcacacacactccctctcattcccacagactgtctcacacacactctatctcattctcacactcagacacacaccccctctcattcccacacacacaccatctcattctcacacacacacacctcattctcacacacagactcacacacactccatctcattctcacactcacagacatacacactccctctcattctcacatccacacaaggctctcatacacacacccaaaacacactccccctcattctcacacacagactcacacacacacacactccctctcattctcacacacatccacacacactcacactttctcacacacatccacacattctcactctctttcacacacacacacacacacacacactccctctctgaccttcactcaggtccttctgctgtttctccagctgggactctagcgacttcatctttcttcccacattgcctcctgcgggagaggctcgctcagcgttcccgacagccccccagccccagccccagccccagccccgccccagcgccctcaccctgggtgctcaagcccttgacctgggcctccgtgctcgctgtgaagttgctgaacgtctctctcaggccccgcagctcctcctgcagctgggagtctggccaggacagcgtgcagagagaagaaaacgggatcgctgtgtccgccaccactgcacccaccactcccttgccacggtcccccgtcaacaccccccaatgttgcccccttcccacccctggggcacccactttgggatccgatcacacagacaaccacaagcagcaggaggctgaggcccagggagagcaggaggaggcgaggtccggagcagagacgctgcaggaggggctggggaggaggtggccctgcaagaggagggggtgtcaggagcgcggggacagaggggaccctggcacagctccagggtcctaaaagggtagcaagctaaggcggccctagtagtctaggaggaaccatgtacatgaagaaatgcgggcggtgggcgaccctgcagggccagaggcaactggaaatcggggagaaaagagggctggggaagggggctaagcgctgagccgccccatcccaccgaggccctgagcttttgctgacacctaatggcatgactgcgtcactgcagccaatccaggaacctcagtccaccccctcctcccgcgccttgaaacgcaattgagtggcccgcgcctcggagtcgctgcttcccctgaaagtggggaaagaaggaaggtttctttctctgtccatgaattccacttgtctttggctgcgtgcagggagagaaggtgcaatagctaccattcaggccctcaagtcttccacccagcagggggaagagacacgttagccctgtgccctgagagctggagggttgggggggcctccctgccgggtctcctccgctgcggaccctccttccgtcaaagcgcgctgcaccccatcccccacgaacttcatccttgctcagcctaaacaattccctgctcggaggacaaagaaatgggtcaaggggaatttgtttttgaagcaaaagagtctcgttctccctcaggtcagagacccctcatcgcccccctcacagaatcctcagacccttcacagaaaccttttcccccttcaccaaactgatcactgacacacacacgcacacgctcgcacgaccggggtccctgggtggtgttggaaggggaaaggaagagggggcgtgacttcgtcataggaagccgacagtgacctcatctctccagcttccagctgttcccacacccccgggtccacctccgagggccaggaggcacaggaaagctttgggcacctgtcaccaataaagggactccaaccccacactccgcccctctcctgagagaggcagttccgacacctttcccagtgttgggggagggagacagacccagagagagagccaggctcacgggcaagagtaggagctgtggctggggggtggagaaccgccaaattctcgccttgcagaggcagggcaaggtggccctcaccttttctgagctgatggtggtcactctcctcattgtccagatgctgaaggtcttgatactccttggtcatgatagggctggcgctggacctgggactgagtcaagactgaggctggggctgaggtgggggctcaccaggactagagtgggaatgaggggcccatctctttactcccatctgattgacggctccatcatggagacctttcttctttctttcttttctttttcttttttttcttttctttttttttttttttttgagagggagtcttgctctgtccccaggccggagtgcagtggcatgatctcagcttactgcaacctctgcctcccgggttcaagcggttctcctgcctcagcctctggagtagctgggacaacaggtgcacgccaccacgcctggctacttttttgtattttagtagagacggggtttcaccgtgttgcccaggcttgtctcaaactcctgagctcaggcaatccacccaccccagcctcccaacgtgctgggattacaggcgtggaccaccgcgccccaccgggagctttcttctttcctccatcccctcccaggcctgacatccagaatccatcctctgatgtttcccacccagcaccccccaacacaccctgggttccctccgcacccctgcacccccagccagcctcccgccacctctcttcccattttacttgctcagggtctcagggtctgattcccaggttcttcagtgctgtgcagatgccgaactaaggagggggctgaagcttggagaatgggggtgggcggacagccgtggacaatgggaggggagcgggcagggtccataggagggccctgggccccggtgtctctgtgtctgcgtgtctgtgtgtccaagcacgccaaacgtggcatctccagtgcccgggactttggacagtaaacagaggtggaaatggattggaacttaggggagtgtgggggtgggagtgggggatgggttgcctctgctctgctccccagggaggagaatcgtgttgcccccacacatgccagtcacctcactcttccgtgcaccgtttgggaggggtgccaggccaggaggggctggggtgggatttgccatatccctcctccctccccgtttcgcttcctgcctctaaattccccagaactattggtgtctccaaatatccctgaacaggatcagagggaccggttctctgctcttgcccaatccagacctgtgaccctggcaccggagccgcaggccccagtttcctgtggggctgagccccaggcttcccagctctggcctgacttgcttccctctcctggggagtaaagtcctccaagcagcatgagggccagcttggttccaggaaaggcaggagagcctccgctgggactggtgccagcaaacctccactcactactactgtgtgcctcaggtcactgcgttcatgaacttctctcattatccccagagcacatcccatttcacagatgagaaagctaaggccctacaaggtaagagcttgcccagggtcatgctgcaaggaagcagcaaagggtagactagaacctgggcagcctgactccaggcactgcgttcgggccccagaaccacacccatcacacagagccaggatcccatcccgttgacacagctgggctccagtgtcccagagatgctaaacgatggtccctcacagccccacggggcttcagagagagccatgtgaatttgaattatgctcacttggaaatcaggcaatattaaagataagtctcggctgggcgcagtggcttacgcctgtaatcccagcactgtgggaggccgaggcaggcggatcacctgaggtcaggagttcaagaccagcctgaccaacatgatgaagccccgtctctactaaaaataaaaaaattagcagggcatggtggtgcatgcctgtaatcccagctactcaggaggctgagacaggagaatcgcttaaacccgggaggtggaggttgcaatgagccgagattatgccactgcactccagcctggtgacagagcaagactccatctcaaaaaaaaaaaaaaaaataataataataataataataataagtatcagctgggtacagtggctcatgcctgtaatctcagcactgtgggaggccgaggtgggcggatcatctgaggtcaggagttcgagaccagcctgaccaacatggtgaaaccttgtctctactaaaaatataaaaattagccaggcatggtggcaggcgcttgtaatcccaactactcgggaggctgaggcaggagaatcgcttgaacccgggaggcggaggttgcagtgagctgagatcgcgccattgcactccagcctgggggacaagagcaagacttcatctcaaaaaaaaaaaaaaaaaagataataagtctcactttaggcccaaatgtgaagtcatccaaatcctattttacagttatttcagtgagaaaacaaggcttgaattttgagagttttcaatgatgtgagatattcaggaacacatctcttgcataaaatgtgacaggtctgtgtgtgccctcctttgtctgtgtcctgacaaccaccatgtcatttatatgtgctgggacaatggccagtgattttgttgactgttgggctgttaattaaacatcctctaatataatcacttacaatcgggcttattcaggcaaatgaacctacattatttcggtcggaatagtggtcacccggctgggcgcggcggctcatgcctgtaatcccagcactttgggagaccgagccgggcggattacctgaggtcaggagttcgagattagcctggccaacatagcgaaatcccgtctctactaaaaatacaaaaattagccaggcgtggtggcaggcacctgtggtcccagctacacgggaggctgaggcgggagaaatgcttgaacccgggagacagaggttgcagtgagccgagatcgtgccactgcactccagcccgggcaacagagggacactccatctcaaaaaaaaaaaagaatagtggtcaccctcacagaaatagtgactagccaagagcacaagaggcacgtcggggatgacggaaaacttcagctcttgggtgtggatgctggttacaccgtggtggtgttcagcttgcaaagctgcagaaaggtatgcagttatgatatgtgcatttttccgtttgcacattatattggagtaagaggctttcaaatctgatttctactctataaccacattccccaaactcattgattagggagcagtgcttggatcagtgctgaaaaacaccctctaaaggcaataacatttattattattattattattattattatttttagagatgggggtctcaccgtgttgcccagactggtctcaaattcctggcctcaagtaatcctccctccccagcctcctgagtagctaggattacaggtttgtgccaccacccttggcaaagcaagtaactttagaatggaagtcagagatggaaggcaaacaaataataccatgtaccaggccactaacttccaagccctctgcaaaataccagagataatactgaaaaccaaaaagtagctaaaaacaaaactatgccacaatggtggtagattgatgccctctgagaattcattcaccctttacatttatttctttaagaacatgttaggccggatctggtggctcacatctgtcatcccaacactttgggaggtcaaggcaggaggactgcttgaggccaggagtttgagacacatgtcctgggcaacatagcaagaccccatcatgcctgtagtctcagctacttgggaggctgaagtgggaggatcacttgagcccaggagttgaggccacagtgagctatgatggtgccactgcactccagcctgggtgatagagtgagaacctgtctcaaaataagtaaataaattaattaaatgaaattaaattaaaggttataggccaggcgtggtggctcatgcctgtaatcccagcactttgggaggccgaggcaggtggatcacgaggtcaggagtttgagaccagcctggccaagatagtgaaaccctgtctctactaaaaatacaaaacaaaattagccaggcatggtggcgggcgcctgtaatctcagctactcgggaggctgaggcagagaattgcttgagcccaggaggcagaggctgcagtgagccgagatcgagccactgcactccagcctgggtgacagggcaatactctgtctaggaagaaaaaaaaaaaagattatataccttggttagggtaatcactctgtggtttatccctgtgtatgctaataaatttgaatgcctttcttgaaaatatattttttggctgggcgcggtggctcacgcctgttatcccagcactttgggaggccaaggcaggtggatcacgaggtcaggatatccagaccatcctggctaacgcggtgaaaccccatgtctactaaaaatacaaaaaaaaaaaattagctgggcatggtggcgggcacctgtagtcccagctactcgggaggctgaggcaggagaatggcgtggcgtgaaccctggaggcagagcttgcagtgagccgagatcgcgccactgcactccagcccgggcaacagagcgagactccgtctcaaaaaaaaaaagaaaaaaaaagaaaataaattttttggccaggcatggtggctcatgcctctaatcccagcactttgtgaggccaaggcaggcagatggcttgagctcaagagttcgagacaagcctggataacatggaaaaaccctgtctctaccaaaaatacaaaaaattaaccaggtgtggtggtgcatgcctgtggtcccagctactcacgcggctgaggtgagaggatcgcttgaacctgggaggcggaggttgcagtgagccaagatcatgccactgcactccagcctgggtgacagaccaagaccctttctctatgcgcctgtagtcccagctacacaggaggctgaggcaggagaatggcttgaacccaggaggcggaggttgcagtgagccaagatcccgccactgcactccagcctggcgacagagcgagactccatctcaaaataaataaataaataaataaataaataaataaataaataaatattttctttaatacaaattaataacgttttcaaatattgaagaattttagaggatatggaccttggattttccttgtggagaaagtctcctgtattaattttgtattgctgataacaaaggaagacccataaagagttgcagtcagggcagtggtgaggtcagatctgtgagtttaacaacagcctggccttggagtgggtgatggctcagagatggtttgcccagaggcagggagatgagatcaggaggctgctgcgttggtctcagtgagaaactgtgaggctggaggccagacagggaaggccagatgagcagaactttagcaggggaatgaagtggacctgtagctactgaatgtgcagtcaggaggggaccagggaggtgggggacagtggcacacctgcccagggtccagaggctactgtagatgggtctggagtctgaagagacttatgagcaggagcctctgaaagcagagttgtgggcgaggtccaggtgtggcaaagtgccctgtggcgaccctgctccgtgagagggcatggtggaaagaaagcagcccaggacagtccctgccagtgggagaagcagaaggaagtacccaggcctggcagtcatccaagcttcagggccagctctggggaccataagcaccaagttaaatattgctagggaggccacgcgcggtggctcatgcctgtaatcctagcactttaggaggccgaggcgggcagatttcgtgagctcaggagttggagaccagcctgggcaacacggtgaaaccacgtctctactaaaatacaaaacaattagccgggcatggcagcgtgcgcctgtagtcccaggtagtctggaggttgaggcaggagaattgcttgaacccaggaggcggagcttgcagtgagccgagattgcaccactgcactccagcctgggtggcagagcgagcctccatctcaaaaaaaaaaaaaaagtgtacatatatatatatattttgctgaggagagataatggaatgaacttcccataagggtaagtcaggaagactggagtattttcagattgggggaggcctgagccgctggtgaacagaggagaaggggctggaagcaagagggcttgtggctgctgagcaagaagcttgccgaaggccggaggctccaggaagatgctcatgctgcaaaaccagcctgaggccctccatcagccagacctgctccaccttgccctcatctggaaaatgggttcatgccccgctcagagtgctcatcaaggttaaatgggataatgagtgaaaagcacttagcgcagtgctggcacacaccaggtgctcagcacgtgctagctgattttatttttattattctcactagcaacacagccatgagttgcattagacctccaaggcctcttccagtttgggaggaggagaaaagggagaagattgggatcaggatggcagaggatgtctgtccccacaccccagagggtggttatagcaacttcgctgggacagagctggaggcccgggggttatctgagttgagacagtcccttcccctgctatggagaaggattctgagctccctcagtccttgccaaccctctcagagcactttccagcctcatgtttgggatgggcctgtgcacccaagggctggagctagacctcctcccaggcctgcagggagtctaatacccgcagatctgaaaagaggcacctgaacaaacaggcaggaggggcaaagcagaggctcttcacgaacttcccaaagagggcggcctatggtcccatatctagaagaggctgagcaggaattgggttgagatgaagcaggggaggttgaggaaaaggaaggctatcctccaacctttcgggctggagggctgtgcgccagggcaagggaagagggggaccaccagtgctgaaaggagcagacgggcctctgcacacaagtttaaatctgagctgacacaacccaccccaagggcttcaatatcccatctctgcagttgacaagaagccggcctgcaggaatgggggcccaagctccctgtctccagtagggtctctctccccccagctctctcctcctcaatgccactctgtccaccccaggcacaccttttcaaccttgggacagccaggattctctgacccaggaccctctctatacctctttcctactttttttttgagacagagtcttgccctgtcgcccaagctggagtgcagtggcgcaatctcagctgactgtaaactccgcctcccgggttcaagggattctcctgcctcagcctccccagtagctgggattacaggcgcccgccaccacccccagctttttttgtttgtttgtttttttagtagagacagggtttcaccatgttggccaggctggtcttgaactcctgacctcgtgatctgcccacctcagcctcccaaagtgctgggattacaggcgtgagccaccatgccaggcctgcctctttcctactttttgagggtaaaacttgttaaaactccaaatgattccaggctttaacttttgggcttatgcatatctgaaaatagaccaagaggccaatgacaataattgctaccattttctaccatgcgtcaggcactgtgctgagggctttacgtgtactttccagtttattcctcccaagtatccaccaaggtaggtagttatttccattttacagctaggtatactgaggcttagagaggttaagctctccccagagtgacagtgactccaccatcgtccctcatcctaacgccagcaacagcctagctggctctccattgccccctgctgtgtattccccttcacacccagagtaactggctcacggttccctccacagccctccagcagcttctacaccactctgaaaaatccacgggaagtcctgtgtgccacgcctctctgacttctctgacacacctatttctctctgtcccccaccctactccactccagtggcctccttctgtcctccaacctttcaaatttattccttccagactgttcgtctccctacttggcacactctcaccaccccagtctttgttgtccttcaggcctccacccaaatgatgctgcaaggggcctccctgaccgcccggtctaaaccagcaagggccatcactctctttcatagtagcacccatcattgtctaaacactctgtgttcacttactccctatagtctgtcatctccactggatgcacccaaagttccctaaggacagggatgttgccttcccagcatctagaacactgcctggttccaaggaacatccaaggaagtatttactgaaagaagtaaaaagtgtggggagaagaggaaccaggatttgaacctatgttgtttgggagcccagggctccaatgcattaattacattgccttctcaagcggccaggccatggccttggaagaatacagccccagcggcaaccgtgcttcccctgaggaataatgcctggagggaaacaggaaggaaactttttaaaaacagtatgtatttctatatttatttgaattgttgtcaggtacgtgtactgattataatttacaaaataatgcatgcaggccaggcgcggtggctcatgcctgtaatcctagcactttgggaggccgaggggggggggggtggatcacccgaggtcaggagttcgagaccagcctgatcaatatggtgaaatccccatctctactaaatacaaaaaattagctgggcgtggtggcatgcacctgtaatcccagctactcgggaggctgaggcaggagaatagcttgaatccggaaggcagaggttgcagtgagcagagatcgcaccactgcactccagcctgggcaacaagagcgaaactctgtctccaataataataataataataataataataatacatgcaaaattatgtgattctaccccatccaggtcaaatatgtgattctgccccttctagtttaacacgcagacgcattacctgcacacaccttcctcagctcctagatttctcccttcagctcacgatagagaacgttatcacagcctcaagccatctgctattacacagaaccaagctaagagaaggattatttgaaaaacatcagggccaggtgcagtggctcacgcctgtaatcccagcactttgggaggccaaggcgggcagatcacctgaggtcaagagtttgagaccagcttggctaacatggtgaaaccccgtttctactaaaaatattaaaaaatagctgtgtgttatggcacgcatctgtaatcccagctacttgggaagctgaggcaggagaatcacttgaaccctggagttggaggttgcagtgagccgagatcgcgccattgcactccagcttgggcaacaaaagtgaaactcgacctcaaaaaaaaaaaaaaaaaaatcctctgaagcagtgcttctccacccagtgagacatcaaaatcacccgggagctttccagaaatgcagacccctggtccctatccccaggatcctgatggactcggtcctgcatagaaaatcctgcagggcaatacgtggctactggttgaagtgacaccccttcagcaatctctgcctctattcttggactactttaggcttggacggccatgccatccacagaatcactacccctgggttggtcttttgcatgaaactctcaactttagtcaggagtggctacaaaaaatgcccttttgcactgtttgggatttaaccaccataactcttagggccctctgcctcagccttacccactggagcacctgagaatcagagaaaggaatagtaccccagcaggtgcccccaaaggttcatctgtgccaaacacatgaagaaggcagaaggctgagagtcaccattctacatagcaggatctcaggagcttcagttaggacttagggccaggaaaatatgactccctaaaagaactaaaattatttctcccttataataaagaagtaggtaattgacaatttccttttttgccatggctatcaggaagctcagagatcacatttaccctcacagttcatatacatttctccagttttcatctttggcatttagattcttattttcctaccctcattatttacaaagctgcctcagatctttcccatagagataggacataaaggctgggcgtagtggctcatgcctgtaatcttaacactgtgggaggccaagctgggcggatcacctgaggtcaggagttcgagaccagcctggccaacaaagcaaaaccccatctctactaaaaatacaaaaattagccaggagtggtggcaggcgcctgtaatcccagctattcgagaggctgaggcaggagaaccgtgtgaacccagcaggcagaggttgcagtgagccaagatcgcaccacagcactccagcctgagcgaaagagcgaaactctgtctcaaaaaaaaaaaaaaaagggtggggggggcgcataaagaaacctagcgtatattcacacagcagttcttatcagcagaactctgtaaagatcatttccaggccaggcgcggtggctcacgcctgtaatcccagcactttgggaggctgaggcgggtggataacaaggtcaggagttcaagaccagcctgaccaacatggtgaaaccccatctctactaaaaatacaaaattagccaggcatggtggcagtaatctgtaatcccagctactcagggggctgaggcaggagaatcacttgaaccagggtggcagagatcacagtgagccgagatcgagccactgcactccagcctgtgcgacagagcaagactctgtctcaaaaaaaaaaacaaaaaaacaaaaaaaatcatttccagatcctagctctgtccacaactccatgaacatgaatgaacgaagtttcctctctattttcctttaaggactgttgtgcttcccaacaggactgagacagcccggcagggatcagagctggactaagtctgcagggccccagacaagttccagcctcccctttctggcctgtcatgactttggacagagctccagaccttcccaggctcagtcttcaccaactcgggttccttgatttgccagttacctccctggcccattttccaggccactaacctctctggcttggagtgaagaaggatctgactctgctgcgcccatctccctccacacccaggtcccaaataaccaggccacacaccaagtttcaagtatctgtctcttcctttcactctctcaaaagaaaaaaataaataaattgcagaaggcggcagcatttccagtcttccctggctcccggacacccgacccccgacccctgccccccaccctccctcccgcatttcccactccctagacccatccctcccttttccccaaaaaaattcccaggaaaaaaaaaaaaaaaagccacatttagaccttccactcatgcaaaccggcaaagaaaaatggtgggggcatgtggaaggcaggggcccgctgcggagtcccctgcttctccccccaaaaaaccacctttgagaagaaaaaaagtggaaaaaataaatgagaaatcaaggaacatggggaattacgatgagggcaggggtgaccccagaccctgccttaggagagagcggaggcctgtggccctgcatccctgcagcgggtgctcctcgagggggccctgacttctggaatgtgtgtgggagaggatgggggagggcaggtggcccccggtgggtctgtgtgtgcattgggggcaggtgggggcggggatcctaaggagcaagggctcggaacaaggagcccagctcccccccagaccccaggttcctggcgttcaggagcccagttctggggtgcggggatacatgcagaggagtgtcccccctccaacaggctggatccagttagaaaggaaataaataagaaggggtgggagggaggccggggggagccaagggcttgggcaattcagtccagaccaagggcccaggtgatggaggcagggcgagtccaggccaagccagggcaggaatcagagtctctctcgggctggaacccagatgtaggggcctgagaggtcctcgatgacacgcttcaccttgtggtagatctcctcaaagctgtcaccctccacgatggctgggagtggggtggagcagggagtgaggccaaggaagggccagaggacacctggccaagggggttgcaccagcccagaggaaggggcacctctttccaactctccaagccataagtcctggggctgcacccgcccacaggggcacctcttttttttttttttttttttttttgagattgagttttgctcttagcgccaggctggagtgcagtggtgcgatctcggctcactgcaacctctgcctcccaggttcaagcgattctcctgcctcggcctaccgagtagctgggattacaggtgcccgccagtgctgggattacaggcgtgagccaccatgccgcgcccacaggggcacctctttctaagccatccactgggggtggcgggggagctctttctaatccgagcaagggcaccctacatgctggcaacagccttgctgtggcctcacctgagaagcactctgtgaactcctgctccagcttggtggctctgtcgaaggctttgcgggcttgctcctctgtgatccgcttgttaatctctctgtgaagagggagggagagcaggcctgagactggacccacctgaccctgccttttatctcctctatccaggaatgttaagtattcttctatttggagcacatagcaaaaaaaaaaatacaattcccaatatcctctggggccacagatgagaaccaccccccacccccctgccacccgcaaccgccccagccaggtgtggctactccagggacatctacggagcttcatccttccagccttcagccccagagatgggattcggactccaattcccaacagccctagaggccctgactcgccccagctggtatgccccaggggctgctgggaaatgtagtcctgtctagccaaggcaggagaggaggggaaagacccgattcccccacatcctctgggttccagggatccccctcaggggctgctgaaaccgctgtccagggttctgaagggagagttgaacgcagacgccttgtgaggcccagggccacaggtgttgggggagcaaaggggaggcccccaggaccatactcacagcacattctccagggagcgggggcggatgaagatggcgatggggtgcaggtgggccgcctgcagccgccgcacggcattggccgagacatcgaggatgcagtgcttcccctgggggcaggcagggtgggcggaggggggccagcgggtggcgagaaaggacagagagcagtgccggagggacacggacggggagaggtggggaatgggaagttggccgaaggggagtgacatggatgtcaagaaacacgggggcagagagtcaggcaggaagcgggtatggacagagtaaaagacagagggaaaggaaagggaagatggagagcacgggagagggcagggacaggacagaatggaggaagggaggagcaccaggcaggcagggacccaagagatggtggcagagccggggcagcagcgagtggggcggggtgtgcaaggcagaggtgacacaggcgggaaggaaagccaagaaaaaggagaaaggaagtaggatagagggaggagggaggggaggacggacagaggacagacagatggaaggaacaaggagacagatgggagggagtgaggcagatggagaaaggaaccgtggagggagggagggagggcagggtgaggagcagcggggaaaggaaaggagttagcagaggagtgggagaggggagccgggccccagaaaagggtgaggcaggggagagggccagcggggagtcaggaaaaagggagggacccagtggggaaggccaagccaccaaagacaaggccatgggaagagaggagaaatggggcaaggagaagggagtggggagagaaagaggccagatggtggtggggaatttggggtcaggaagtgagggaggtgggagagagagcaggggcagagagcaggcagtcagacagagttgcccaagaggagaaggaggtggaggagcggagtggagacccagcagggaaagagacagagagagagagagttagagaaagctggagggaggcagtggggtggggagaggggagaaggaagaggaccgggtgcccgccaggtcctacctgctctgccacctctcgcacggactggacgctggtcccatagaggtggctgttgtactggccggcctcaatgaacttgtgcgcctgaatgtccttctccattttctcccgggacgacacaaagtggtaatcccggccatctatctcatactcccgcttgggccgtgtcgtatctgccaggaagtcaccccaccccccaaagatctaaccaccatccctctagcttaaatcctgcctacttcaatcaaatccccatagtgcccagctggtcctttggtgaaagggagctgccagggagaccaagactgcagagggccagaaccgcttcccctagcaccctccagggcctccaagtctctggcctgggcatgggtactatggaatgagagggtggctgagaagcaccccttctcggagaaaccctgtatctccctacacaccgatcccccaggaggctctgcctatggccccagggatgggcctcccctgccccacccccacttccaccttctcctccatccaaggccccagcactcacggggaacacaggatccaaacttgtcggggaactcggagagaagatcatcgttggcgcggtccttggtgggcccaaggatgatgatggggcgagcatagtgcactgcagagagagcctggcttaggccgagcgcagggttgggggagcagcaagtgctggggccaaggcaggggccagggctcaccttccatctgcgtcactgtctcgtagctcagaaccgagtcttctcgacctggtgggaggtggggcatctgcaaggggctctgaaacaggggacctggagccctgtctcccccttgaggatatcaaaagcaactcagtgctcctctcacccacatcttcccgaactaaccctacctaccctgcgatccagagctggagccccagtcctaagaagaaaaagcaggccacggggttagttatgagctcagctccatgagccctcacacttccacccaggctcacaccctcctccacctaccttggcctttaaccttgaccactctcgtcgctcaaccctgtgggatacatggagggatacgcgggtaggggaatgcctaccccctgccacccccatgctctgagccagctgacaaccccttctccatactctgggccagctgacaccccttctcctgcagccctggacactgtgctcctcaataaggagttgtccttcccaaaggctcatgggagccacggaccccaggagggcccaacagacaaacccctaggagttcagagggcaaacccatcccctgttggctgcccaccccgggggaccttgggaacttcagtgcctgtggcaggaaggctacagagcccaggagcctcaccgccgtttgctggggatgaacccaatgtcgtcggtctcactgtcagagtggacccgccgtgcctgccaccactcctcatcactagcatcgatgacatgcagcacatccccaaagcggaagctcagggcctggctcaggaagccgcagtccttggtcttgtcgtaatcaaacagggccctggagggcaagtggctatcggtcagagcccagctgaggactccaggaaggatgccccagtcacccaaagacccggcccagaggtctgcagatggcactcccatgggagctatggatgccgaggaacccaaaactgtgtggggaccaaacgctgactataactcataacaactattagccatcactcagtccacactgagcacagtttccagaggcagggcttgaacttgaccctctcaagaaagcagtttgggccaggcgtggtggctcccacctggaatcccagctgactttgggaggccaaggcgggcggatcacaaggtcaggagattgagaccatggtgaaaccccgtctctactaaaaatacaaaatattagccgggcacggtggcgggtgcctgtattcccagcttctcgggaggctgaggcaggaaaatggcatgaacccaggaggcggagcttgcagtgagcagagatcacgccactgcactccagcctgggcaacggagcgagacaccgtctcaaaaaaaaaaaaaaagaaaaagaaaaagaaaaacagaaagcagtgtgcagtacacacgcacatcataaagtcacaggggtaaccctgaatctgcccaaattcataagaaaaagaaaatgtcccgtgtttccaaataatggttacccttaccagtatcaaatttctatcagtaagtcacaacccctggggtcagaaccagggaagtaatgaagacacagaagaaagcaatgggcctggagaggagggaggagaccccgggccccctggaagtgtgacaaccagatgacattccgcctgggagccactacacaacctctgtggtcactgggagtcagaacaaccttggggaccaaccggacccgagcagggaggaagggcagagcaagggctcaggtgggagccagtgtctgggtggctggtgatgccatccaacaagagggaaactgctggcacagcaagatggaacccaggcccacagcaggatgatgagctcagcgtgggacatgttgagtgtgggacgcctgtgggacatcccagtggagatggccagaaagccaatggccagaagtgcaggtcttgacctctggaaataggtcagccagggccagcacctccgagagacatctgcagagcgcagcggcagacgaggccatgcaagccacagggccagacagggacagaagtggaggggtgacccccgggggcgggagagaggtgtgttttggcagaaacctaagccacaaaaagagtcaatggagacgagccctaagaggggagcaaaatgccgctggagagacgggggcaggcaccacagagctgcggcccacgtctccgggactgcccacagggacgtgaaggctggggcaacactccaaataccctagaggaccctgcttcaccaagcattaaccttcgagacgccaaattgtggggtggcctgggagtcccggggaagtgctgggatgaccaggggctagaaggcaattgggatacttggggcagaggctattttcccatcgacagggagtatttcaaatgttaacctgtgcagccaagcccatgaaccctggctgcgcctcaggcctggggtggggagctagagcaggcagggtggagaagaggagcggctgaggcccgggccaggcacagagtgcccaggaacgcagaggggctgaggagtccagcccgggaagcctctgacctgatgtagaaaccccttttggggttgctccgcagggacgcagtccctgagcccaggctgctgttcatgagctgttcccgaaggtcgtggatcttggcctcgaatcggctgtactctgaggaaggacagggaggtttctgagctctgtccccatcctactgtcacccctgtcctcccctactgaagccatcagctgaggaagagttctaagggccatttcagctcacaagacaaggaacttccggcctggtaccttctggtttatactgagcgatgatcgtgaccgtctgacccgcattcttcagggcaatggcagcctgctcatggctggcatttcggaggtccacaccgttgacctagagagaggacgacaggctgtgtcaccagagacaggaggcagcacttctgggtccaggtggagcagggagtggtcccgcaagaggactcggctgcagcccatccaggcccctccccaagagctctgcgctctgccctgtggggagggggtggtgcaggtaggggcaggccttccctcaccgacaggatctggtcccccttccgcagctccccactgaggtctgcagggcccccggccaggataaaggagatgaagatgccttcaccgtcctcgccacccacgatgttgaagcccaggcccgtggagccccggtggatcacaattcgcctcggttctcggggaatgtcttcctccccgagcaggtccttggccactggagagtagcgccgaggggaagtgggggtcatggctgtggggtagtcggtgcccaggtagctgctgtgactgatctcattgtccaggtgctgggaataagctgaggaagacagggcagagatgaaagtgcctggagggaaacagcacccgccacccaaccttctccccagggtgccagaagagccaaagttaggtggaagggaagatattctgccagagatgccagggtggggtggtaaggggatatcagatcacagtgacatcaggggtcaggaatttataggtgacatcagaggctggttgtcctaggggataaaggatttgaacgttatatgtcctcagtatgccagggatggggaagtcaaagggagcattaatattacgctttgggggttttctctgggttcctgtgtcactcgaatctcttaatccataaaattcttctccctcttttttccccccacctctctgccatccattcgttgaaaaaactaggtcatttgtctaaaagaatttcccacattctatgagggaaattcttttgtttttttggggtttttttgagaaggagtctcaggctggagtgcagtgccgtgatcttggctcactgcagcctctgcctcccaggttcaagtgattctcatgcctcagcctcccaagtagctgggattacaggcgcgcgccaccatgcccagctaatttttgtatttttagtagagacagtgtttcaccatgttgtccaggctggtctggaacttctgaactcaaatgatccacccgcttatgcctcccaaagtgctgggattacaggcatgagccaccttgaccagcctatgagggaaattctaacagggaaattactgcttaccctcctgtggtttgtttagcctatgcctctgcccctgtatctcctgtaaactggcagttcattctggaggcttgatcagtttcaagttcaattcagagttttttttagtaactcctgtatacttcataggtagcgctacgttcttcctacagcatcaccacaggatgcaataatgcctggttgtctttctgtcaggtaagattaatggtaggttcagggtcatcagcccagtccatccattatctagcgccccatcagcctttcaggtaagttttagccacactgacaatcaccgcctggttctgataagtatcaaggactgcaaaatggtggtgattgtcatttactagtgggaattcttctgtaaaaaagaaaaatctcgaccaggcacgatggctcatgcctgtaatcccagcactgtggaggccaaggcaggcagatcacttgaggttaagactttgagaccagcctggctaacatggtgaaatcccgtctctactaaaaatacaaaaataggctgggcgtgctggcttacgtctataatctcaggtactcgggaggctgaggcaggagaattgcttgaacccaggaggcggaggttgcaaggagccaagattgtgccactgcactccagcctgggtgacagagcgagactccctctcaaaaaaaaaaaaaaaaaattcctccagcttgggtaacatggtgaaaccctatctctacaaaagacaaaagttgaaagttagctgaggctgggcgcagtggctcacgcctgtaatcccagcactttgggaggccgaggcaggtggatcacaaggtcaggagttcaaaaccagcctggccaagatggtgaaatcccatctgtactaaaagtacaaaaattagctgggcgcagtggcagggccctgtaatcccagctactcgggaggctgaggcaggagaattgctggaacccgggcggcagaggttgcagtgagccaagatcgtgccactgcactccagcctgggtgacagagtgagactccatctcaaaaaaaaaaaaaaaaaagttagctgagcatgatggcactcgcctgtaatcccagctactcgggaggctgaggtgggaggatcgcttgagcccaggaggcggaagttgcagtgagccaagatcacaccactgcactccagcctgctgggtgacaaagcaagacctgcctccaacaaaaaaaaagcaaaaacaaaaacaaaaaaacagccctatgtcaacctgttggttactctctgaggtagctggtacatgaaagggaggataaatgcatgcctctctctgcatgcctctttccattcattcaccaatttcagaatgaatgagattgcctagcatcctccaattttttttttaattatttatttttttgggatggagtttcactcttgtcgcccaggctggtgtgcagtggtgcgatcttggctcactgcaacctctgcctcccaggttcaagggattctcccacctcaacctctccagcagctaggattacaggcacccaccaccacgcctggctaattttttgtatttttagtagagacggggtttcgccatgttgggcgggctggtctcgaactcctgacctcaggtgatccgcctgcctcaacctcccaaagtgctgagattacaggcatgagccaccgcgcccagccaaaatatttttaagtattattatgatcttaaagattttaatatatttaacgagttttcactggacagtagaagcaccttcagtttggatcctgtgtctttgctgagaccctattagtcctggataccttccttgctctctagtatgaaagaagttagaagctcatcttacagatttattgccaaagattttaaattggctgggcacggtggctcaggcctgtaatcccagcactttgggaggccgaggtggggggatcatgaggtcaggagatcaagaccatcctggctatcacggtgaaaccccatctctactaaaatatacaaaaaaattagccaggcgtggtggtgggcacctgtagtcccagctactcgggaggctgaggcaggagaatggcatgaacccgggaggcggagcttgcagtgagccaagatcgtgccactgcactccagcctgggcgacagagcgagactccgtctcaaaaaaaaaaaaaaaagaaaagaaaaaaaaagattttaaattgacccttcttccaaggagcccaggttccttttgttaggttatggtatttaggaatagtaccacatgattttaatatggttttacagtattatttcatattttgtaggggctgccacacctcattatttgtttccaaaatgtcttagcttttccacacaaatttttccagtcaaactttagtgtcaaccttccaagttcccagtagggaaacaacattaaaattctgattaggattgaatggaatgtagattaatttggagccggttgagatctttagcatattaagtttttccatccagagacacggtgtgactcctcaccccttccagtcttgttttatgtctttcagtaaagttttgtcattttcttcatacaaatcttacatttcttgtcaagtttctatttctaataattttatagaaattttttctatggcaaaagggggctttttattcactacattttcttattgctgggaagttactaattcctgttatttatcttacaaatagccacattcctttttttttttgtcgttttttgagacagagtttcactcttgttgcccaggctggagtgcaatggcgcgatctcagctcgccgcaacctccgcctcccaggttcaagcaattctcctgcctcagcctcctgagtagctgggattgcaggcatgcaccaccatgcccggctaattttgtatttttagtagagatggggtttctccatgttggttaggctggtctcgaactcccaacctcaggtgactcacccatctcggcctcccaaagtgctgggattacaggcatgagccaccggcgcgcccagcctgttttggtttttttttttttttttttttgagatggagtctcgctctatcgcccaggctggagtgcagtggtgagatcttggctcactgcaagctccgcctcccagggtcaaggaattctcctgtctcagcctcaggattagctggtattacaggcgctcgccaccacacccagctaatttttttttgtatttttagtagagacagcgtttctccatgttggccaggctgttctcaaactcctgacctcaggtgatccgcccgccttggcctcccaaagtgttgggattacaggcatgagccacctcgcccagccaacaaatagccacattcttaactttgcatatttttccagttaattcacttagattttgatctagatgcacagtagtataatttacaaatagagataacttttgtttttcccttccaaatgtaactattctccttgtcttgttacactgtctgaaatctctaaagcagtgattctcaaccaccataatttcgctggggcaattctgtcataacattttttaattgttatgactgagggggaggagtaccattgtcatctgatagacagaggccagggatgctgcttaatatcccacaaggcacagaacaaccccccacaatgaagagttattgggtccaaaaatgtcaggagtaacactgagaaaccctgctctaaagcaatgaagaataatagcagtgggaagaggcatccctgccctctttgtaagttaacggaggccgggcgcggtggctcacgcctgtaatctcagcactttgggaggccgaggagggcagatcacctgaggtcaggcattcgagaccagcctggccaacatggtgaaaccctgtctccactaaaactacaaaaattagccaggcgtgatggtgggcacctgtaatcccagctactcgggaggccggggcagcagaatcacttgaacctgggaggcagaggttgcagtcagctgagatcacaccactgcactccagcctgggcaagaagagcgaaactccatttcaagaaaaaaattaaaattaaattaaaaaataagttaatggacacactgctaaaattgtatcattataaaatgtttgttactggttcctgataactagtcttcaccatcttaaggaaaatttctgtgttcctagtttactaaaagctttcatccaaaagagatggtgaatttcaccaaatgcctttttcacgtctatttaagataatcacatcgttttctcctctcgctctgtcacccagtctggtgggcagtggcgcaatcattggcttactgcagcttccaactcctcggctcaagcgatcctccagcctcagcctcccaagtagcaaggagtataggcacgtgctaatttttttaatttttttagagacaggatctcgctttgttgcctaggctggtctcaaatccctagctggtctcaaatcctcccactttggcctcccaagtgctgggattacaagcatgagccaccacacttagcctcccgtaacgttttaatatatgaatcatattaagagatttcctaatattgagccatctttagttttctgaaacaaaccctatgttattcccttaacatgctgccatgtttgctttgctactatattattgtaaactcttgtatctctattcagaagcaaaacgggtctatactctccttattttacactatccttgtgaccattcgaactggccttataaaatgaaatgtgaaatcttttatcttttcctgtactctggaagagcagaagaattatctattccttgagaatttcacaaaattagccataaaaccaaccaggctttgtgccttccaggagagagatcgttgacgatcttttctagttcttttatggtaattgattttccatctcttctccaacaacagcaaggatcagaggttgtggctatttcatagggaatatctgaagagggacagctacagggatgtcgtgggactgcatgtcatgggttaaacgggatgggtcatggggaactttggtgtttgaagggctctcacaggttgtgatgtctgggggagcatagctgtcactcaggtaggcattgctgggcttggccacctttaggtagacaacatcatacgtgttcttcagggctgccacagcatcttcatgcatgacgtcctctagccccacactgttgacctggagtcaaggaaagcaaagctcagacaaagccacaaatggcccaagacagaagcactggggtgaagtgatgaacttgggcctgccagggctagtaggtgagacccaaatctgggctagaaaatgggctagatggagtcctcaccgccaggatcttgtctccaatctgcaacctcccatccttgtgggcagcacccccttcgatgatctttgttacatagatgctattatctcctgggatgtgctggttccctacgccccctgcgatgctgaagccaagacctggatggaggggaggccagaggtgggtgcccaggaagcaggcttgggggcacaggacagttgggatgggggtgggaacaaaatgagttactacctttaggccccttgatgagcttgatctccatgaccttctcagccgggggcttccggcgcatgacatagaggcgaacgatggagcctgcctctttgagggcttccaccgccgctgagtgggtcacctcgcgcacgtccacttcatttacaaacaggatgctgtcgttgaccctgggagcagcaaggtgggcctgagccaagagcttcctgctgccctggccctccctctccagggaccaagcaacctaacccctgtctcctctccccacctgaggcggccatcctgggccgcagccccaccaggaatgatcttggtgatgaaaatggatgggtcgtcaccgatgtgtgggttgtcagtgccacctgcgatgctgaagcccagacctgagttaccctgggtgaaggaggggaagagggtcagctcccctcactgcccaagtctggcaaggcaagtggggtgggaaatggcttggagcagccagaggaggaaggcacagggtgaggggctagccacccagaccacatggcagaaagaaaggtacagacgggaggccacggggactgccgatggaggagcctgctcaccctttccaatgtgatttcctcgtattccatctccccctcggtcccgttcacctgcaactccagcacgggacagaaacacaaaagcagtgagacagacattcctgtctgaccacctgcccgtcatctgctgccctcccttactccctccttccttctgcaatggccccagccccaaaatctaaacaactcacatatcctggggcttctagggtatctgtgttgacaatcactgggggagaattggcctgtttgggaaaacaagagacaaaaagcagcctgagccttgactcgagagggagcccataacggagggtcccatcagcgtggctaccctttcagcctcttagccaagcccactccgccaccctgagagctgctcaagggcccagcctcaatccacatcacacacacgcacacgcgtgcacatgcgcacgcgcacacacacgcacagatgcacacgcgcaaggatctaactctgcccagcccggggccccctgcatgtggaaggaggtgtaggagaagcgggaagggagacagccagacggagaggggagcagcagatggcaaagagtggggagaggggggtaggcttgggggaagggagcttctcaccggatgtaacaccacagggtgttacatgccttatgtgctacacatggacaccccagggatcatgtccaccgggtcctggtccccatttcctgccccatccccccaaccccccatatctacccagatattttcataaccctcccctagacttgcccctcactttcacagacatttgccctaaaccctgcaccccgggaatccggggttccccagctgcaggcccctccctcggtctcaccaaccagccgtccaatccaccccttcctctaaggaccgtgttgcctagcaacggtatctaggaccagtcaagacccggggagacccacctccaggaggccctgtcgtcaggacaacaggggggtggggcgtggcctggggccgaccaaactcctgagcgcagaagggatccgctagccccgcctctcctgccctgggccccgccccacgttagccaggccgagaggaggccgggctgaagaggtttgtgggcgcagcgcatcctgaataacctgccttcctcgctcccctacgcccctcaccctacgcagtgcaaaggacgtcaggaactgggagtggtgaaagacatccgggtcctatcccgctcatctactccctccccccacttcattcgggaaagggttaaagtggggcgtgcccaggtccctgacgtcaatcgcctggtctctagactcccaggcggggcccgctttagcccggtcctaggggcttccccaattgccagggcaaccgaagccacgtctctatggcaatggggggaggccgccaagagcctccttccggggtccccaacctacttcctccttaaagaaacatgtatttgcagtcgcccaagcgcaaggattccccagtctccttcccgctctccccgtccaaaggggtccctcccctctcctactgctatttctcaagcctacaaactaccgaccattttcaagctgtatcacagatttcacacccataaatctattaacaccaccctccaacccttcacatatcagcaaatgctgttgtccaaccaacagtcactgactgccaaaatctcatccacgtgttcatcccccatcccacagcccgtcccccatcccacagcccgtcccccatcccgcagcccgtcccccatcccgcagcccgtcccccatcccgcagcccgtcccccatcccgcagcccgtcctccatcccatagcccgtcctccatcccatagcccatcctcaatccccatccccatccctatcctggaacctccttcccagcacacccaccttcatccactacgacattcatttgcttcccatccctatctctgcccgcatcccacatgctccatctccatccctgtctcgcccttcaacatccatcttccaaccccagcctccattctccatccgcttccctggccctgtcgcaccctccagccccatcccttaccaatgtggcctcatcctccatcccaatttctttttttccagagacaaggtctcgctgtgtcacccaggctggagtgcagtggtgtgatcatagctcactgcggccttgaactcctgggctcaagcagtcctcccacctcagcctcctgagtagctacaggcacatgccaccccacccagctactccatctcaatttctgattccccagagagtttatcaccattctcccttaccctaccttcataccctcaagattattctcaagtaacaatcttacacttctcaatcaactcccctctcttctgaaaattggggcttctcctgttccccaggtgaggccttgtcctgagacctccaccccatgcttatggcctccaacactctctccctccacccccttctgctcctgagctctgatcagcagcagctctgtactaactaccacccctcaggctccctacctcctcttccccctgctcagggatttaatggccctgccttgcacaaagcatctctagtcttctttccctcactcctagcatccacagaattcgcacaaacactctgtaccatccctgtctccagggccttcctttccttgctctgtcagcctcattcactgccctgatctcacagtcttatccctatctggcccctgacccaggacctcttacccttcctatcccccaactcctctcttgccagttctaactccagaacctgcttgcccgctccctaggctcagagacctcctccccatcttcttggtgaaatgtcagcaacctcccccttcccagagcatcccacaacatcctagaatccccaccctgaccccacagtgtcccctcaatctcacagcttgcctggtgctctccagtcctccccatcctgtgtccccagaagaggagatggaggaaggggaagatggaaagtggactggagaatggaaggtcccagaaaccaggcctcccgggactggagagaggaggacgctgtgagcagagaggagaaagggaaacaggtggtgggggatgatggagggggcagagggggatagaaagaagatatggcagaggtgagaacccaagaggatgagagaggggaggaggaaaagagggaaggtgaagatgaataggcaagagggaacatgggaaaggggagctggctgatggagggagaggactgatgagggaaaggactgatcaggccccagcggcctgggctggggatcagggagagggagaggagaatgcgtgggaggaagagagagacagcatcaagagccagccagccagccagccagcagggaggaaaggctgcagagggggaagagaactcaggagtggagcaaagctggggcaggggacgaggcagcaaggccccaccatgtgaagtctcaggccagacagatggaaagagctggagacttggggacagggcgagccaggcccagaggcggaggtagggggaggaggcggggaagggacaagagcaaatgagggcagcaggcgcttggaacagagctctggacacagaaaatggaaatggaggttgggggtgtgaaggaatgaagaggtcccaggcgtgggggcctcttgggggatgcacacacctcaacacacacgcatacagcacacgcacaggcacacaaacggcgcacgcacgcacacacacacacagcacacacacaggcacgcatgcatgcacacacgcacaggcacacacacagcacacgcgcacaggcacgcgcgcacacacacattcttgctttaggctttacatccactcccattggcctggcctgtttctcctctgtgggaccaaggtgtttccagccccacaaacgccccctcccccagaccccaggagcccaagccccaaacccccgcccccagtcccagcatccccctccccacggctctctctcaccctaccggcccttagggattgctgcagctccgaggctccgagggccgcactggggagggggccaccagggtctcctaccttgaagggggagaggtgggcgtggcccacgaccccgtggccagcctcgaggtgggacaagttcctctccgccacgtgcaccagctcgggggcgtttacctggttggggaggtgggccgggctgtgctccagagggggcgtgtcttcatcttggtagcggtatttctggggatggggacggaggtgtcactggggccagcccggtgcctcaggctccaggctggccgccctggccgccgcctcttcccccagccagtgcagtgcggaaggccctggggcctgaccagctcctccccctccctctcctctagcccattggctcccctctctccactctcccaacagccccctctcccgccagggcctcagcacctctcatcaatccccaggtcccaatcccatcccccaactcctactcctcacatcctgggacactggccttctggtgggcatagcccctctggcatctgtgtcttcacccctttccccaccaccttcatcttcgagtccctccagcttctcagagctctagccccgacactcacatctccattctctgcctccagtccccaacttccttgcttctctcaccatctcagactcactcttgttctagcctcccctcccctacccctctggctgctcctactctgcatggcatcctccccgcgccccacctccatggcctcagtctccccattgcagcctctaccccacaggtgattggctctcctttaccttgcactccttaggcaaggactgaagtcaccccttccaccagaaggtacttggtatcagcccccgagacaggacaaggctaagcctgtccagttcactgcccttgctggtttccaagcagtcaacagaggggccccgggagtctggccctacccctgcaacagcccacagcccagccagctaatccggttatgctataagggcatgggctgggggaggaaggggaagaacagagacagcagggctcaggacaggggcaagaatgggtgccagcctccctggttggggaggagggtagcatgctgagcctcagagtgaatttctggtctccctctgctcttttggggtgaaaggcccaacatgacccctgactccctgcccagttaatcagctgccatcccaagggcctcctgtgctagcttaatagggacaacagtaaaatgagattaactgggggccagagaaggaggaaaagggcagatggagacagcagaagaagacagcgtttctgcctgggtccttccgtgtccgcctctgccctcgcctgctcctctcctctggaacgggcctccacagagactgaccctccaagctccaggttcaggaaggggaaggtatcatacgcagggatccctcaggaactgaagaagacagaatgcaccgcccagtacacatgggtaaaaagagaaggcacggcaatcccagcactttgggaggctgaggcaggcagacagcttgagcccaggagctggagttggagaccagcctgggcaacacagtgaaaccctgtctacaaaaaatacaaaaattagccaggcatggtggtgcacacctgtagtcccaactgctaaggaggctgaggtgggaggattgcttgagcccaagaggtggaggctgcagtgagccatgatcacgccaccgcactccagcctgggcaacagagtaagaccctgtctcaaaaagagagagaggccaggagcagtggctgatgcttataatgccgaggtgggtacatcacctgaggtcagagaccagcctggccaacatggtgaaatcccatctctactaaaaatacaaaaattagctgggcgtggtggcacatggctgtaatcctagctacatgggaggctgaggcaggagaattgcttgaacctgggaagcggaggttgcagtgagccgagatcatgccactgcactctagcctggcgacagagtgagactccatctccaaaacaaaaaagagagagggcgagcagaatttccctcccaaaagtttctgagaggctgagagtgccctaatacttagagggcagcagctgcgagatcaaatgggaggaagcttatcaaggtcaatggccaatccttgagtaggattctgaaaatgttaaagatgatgaatcaaggctgagaatataacacaactttggctgtagagtaagggtacagtaagagaatgggagaagggaagtggtcctgtcagcacgaaaactctcaaacccagaacacagagacaactcaaatcaagaagcaccctgatacatttaaagagtcttaaagaaggaaaacgggctcagcaagattgagtctattctctgggccacagacttggagagaatcctgaactccagatttcaatccgatgggcacaaaaagtagagaaggaaaataggagaacacacaaaatagccctcctccaaggctgagctgtcttgaataaaggagttctatgaaccaacagagactgttcattccacatcctgagaaggtggtcttctacctgggcagtgcacaagctgaggggcaagccccagaattgagacctgggggaaggggtggaagccgctctccgctatccactcttccttcacaaggcctccaattccctgcaaggtaaattaggaccaaagctccaagttttggagtctgggggagggtttgagtccagtgcctctccatcttcactccacctcagagagaaaattcctgaatctgaggaggaaatgtcagcgtgcacccaaagaaaatggaaacatgaggagggccatttcatcatttattctagggaggaaatgaaggtaaacttttatctcagcgagcccccaatacctctccctgccccacccccatggagggagggtggtgtctggcactgaagaaaaggctcctcaggattgggaggcaacatggagaaaatggggaacaagaaatgggtgccagggtttccagaatgtggctggaagaggttagggactaggttcagtctctggaaattttcgacgtacatgtaggggggcggggagaaacgtcgggaggggtgggggtgggggcgggggagagtaattctgaaactgcagactggggggctggggcggtgggggatcagcacctctcagtcttggattacagggcaactaaagcaggacgggaaaggaggaccccccccatcctttatcctactgggactcagggccctaacccagacaactcagatgctactgggacatatctgcacccccaatatattagggcttaaaacaagtaaaaggcctggggaatgggggacacggacggagtcgctgttgttccttcccctttggccccctcctcaccagagccccagttgcacagaatgacctggaactgaggcttgcacccccaaaacataggggtgtgagtcaaagtgaatgataagaggggcgacccacggcgcctgtccacgagaagttgcaacccagagaccccgcaccaagcagaaggaagagcgacagcgcttgaagcttgcaccctgatatttgcgggggtccgggaagggggagcgggccggagcccataccgcggcacgtaccacgcagagacacatggaggcgaatctgttccgagccgacatggagaaggggagggggactgagggaagggggtaggtgggatatcaagggtcccgggggttgggggagggggaggggcagaggggcgggggctgcggcggccgcggcaactggaggctgcggcggggggggggggggggtgacggcgcctgcgcagtaaggaagagcgtcacgttgggagagaggggtgaggggagaccctcttagccaccaacttccctggttcacgctgtttctctgtgaacttcactttccacagtatacttctattccgacccctctacaattaaagacagacttaaatttaccagtttatctctctagttctcagggaccccttattccatcccatctaatcccccaaccccaacatcgcgagaccccaaaccattccaaaacctcactggacatctcgtcactactggcctcccagagtccagggaaacaaacagcacttctctcacaagaacccccaagggatctacactgcctctcccaccaaacccccgcaagattggtgctgtggatagcatctcctcagattccaaggcatctcctactctaaccagcatagttctcccctgcagtccagccccacctgataggcagcccatgtttcttcaagagtttaaggaaccacagagccttgttggccccccaaattaatatatgctaaatcatccctttctatatcacatctatctcccaatccactaacagggatgttgcaattagtgcaaatattactcttgctctaatataaacatccaaataacaagtcctctaatttgttggggatcccctgtccaaacccccgaatctaataagatactcatgacttcctaatatgccagtctccaaatccacaccagaacccaatttcaggaaatatttaatctactttaaagcagaccctccaaattaaatagcaatctcgtcaattttttccaaaactcttataaaaagaaatgtagacgggaagatcgctggaggccaggtgcccaacaccagcttgggcaacatagtgagatcccatctctaaaaaaaaaaattttggcctggcacggtggctcacacctgtaatcccagcactttgggaggccgaggcggttggatcatgaggtcaggcgttccagaccagcctggccaagatggtgaaaccccatctctactaaaactacaaaaattagccgggcgcggtggcaggcgcctgtaatcctagctactagggaggctgaggcaggaggatggcttgaatctgggcagcagagattgcagtgagccgagatcgtgccactgcactctagcctaggcgacagagtgagactcggtctcaaaaattaataattaattaattaaaagtattttccttttccttttcttttctttctttctttcttttttttttttttttttttgagacagattctcgctctgttgctcatgctggagtgcaatggcgcgatctcggcttactgcaacatccggctcccgggttcgagtgattctcctacctcaacctcccggatatctggcattacaggcgcccgccactacgcccggctaatttttttgtatttttagtagagacggggtatcgccatgttggccaggctggtctcgaactcgtgacctcacatgatccgcgcgcctcgggctcccaaagtgctgggattacaggtgtgagccaccgcacccggcacctcctctccttttctttacccctgaggttcatagattacacccttttctgtctgcccagaacatcccctccacgattctgaattccaactttgtcggaagattgctcccaaatatatcttctccacactcaggcctcaaaaaatacacaccaaagatacggccggcaatctgcaatgacccacaaatcgtccagaacactcccaaccgcctccttcaggtctcttcagagatttccattttctcccaaacaacttaacctgaaagcctctcttccaaatattctcccattgaacgcccacccttccagctcttaaaacccagtgaggggtctcctcaaatcggctgacttctataaaatgcccatacatggtagaaatgacgacttccctagaatctcacccaagcgagattgaccccgttgatcggcatctgttacatgcgcccccaagatgacccccaatgtcctagtttcatatctggtaggaaggcttggatcaccagaggatccaaggagtcagtgcggaaggggctggactcaaatttccttctagaatagaaaacctgcaggccctgcttatccaccagtgggcgccatggcccataaagacccttccccatcccccatttcccttttccctccattttccgtttctctgttgcctggcaacgcagcaatcaaggactttgccgtcgcctagcaaccgtctcctgggaacacagagctgaggtaggaggggtgctctgatgaaatctgaacagacctccatcttaggaaaattgagacgtcagacttcccaacccccggattctcctttccaaagacccccgcgccctgaagttacttggacaatagctcctcaaaccctgtctcctttacgcacggggggccacgccacgcccatcccaggtcagccccgccctcatttcggtcaggtaacccagccccaaggttcctcccctttccgaaggttgctgcctccctcgatagagtaagccagaccccacccacctgcccgggaggccacgcctccgtccacttcccgcccgttcgctccccctgcctcgcccacactgtccctccgccacgcccctgacggccaatgaatgaggccgtcggccacactgccccgcccccggcatctcggctttgcccaataaggaccacccggagggtttaaccgcttcgctcctggggctctggcaaatagcctcagtctttcccccactgtatccccacccccacttgttctgctccgccttccgccaccctcgcccggccctccagtccgccacgcagcttcagtcgtcgccggttaccatggcaacggcggcagcagcgcggggaaagggggagggacgggggcggagtgggagaaagagatgctcagagacgagagattctggcagagataaaggcaccaagaaagacaaagtgatcgctgtagagtggagtttgcacacaacacagggcctagcacgcagtaggctttcaataaatgttccttaaattactgcggcaggagtctaaatataggcaatgaaagatggaagactcaggcagagctggggagctcaacgaccgcaaagcctgagcactccctaccccatccagcatttggggaagcaggagccatgtgccccctgcaggctcctcttgggctaccctccgctggctgccctggatagagatgaaccacaactcccaacagcgccatgggcagcaaccctctaacattgagggatctggtgcctcggggccttatgggagttggagtccccaccataccgaggctgacaagttttccagccaaggaatgtggcaagcctgggtctccacgcctctgtaaaccccaaatgcatgatctgctctgtaagcctccttccttcagggatgctcaaccctgggctccatggaagaagtaggagtctggagtgggtaatgaataaggccacccacccacccagaatagctgcctgctggcaagcccctcaccctcgctcccatttgtgtgttcacgtgttggaagcagagcccacacattccagcgggctttctatttacacctggaatgcaggggaccacagccatggagcctaaggccaagtgacaggcctaagggcaggagacagcgggagcagaggaaaccaggccagagaaactgaggcataaaaatccaccgaaactacaggggatgtggggaagaggcagcctgggagaaagcccgaaacccacagaatgaaggacaagaaagtcgccctggtggagagagggtgggggctccagatctaaaggtcctcagcccccaatctcttccaaccatcctcacacgtgcacaatgcatgtgtacacacatgtgtgagtttgtggcagggaacatgtgtgtcctcagctccctcccatgaaaagctgcagttcccactaaatataaccccctccccagcctgtgactcacccggaccccgcctcccccggcccccacttcctgtcccaccccccagcccccagctgcctgccacccgcccaagcctccctccacacaccaggcatccagctctccagtcccagagtctccaaggagagcctaggtatctgcatcccaccaggagctcgcctgtgctccatccgagatctcctgcctttgccaggctccaaccagagggacactcttgcacagatccccatcgctgccagccctgccctcctcctacaccttttcaccccagtaacctcagtaacttcggtcataagccctcagggacccttaaatccaggtgtcctcccccaccttgatcccaagcgtcaggggtatctggaacagtccccacatctgctcttctccctctctcttgatcagggctagatacagtgtgggaggagatggggatattgggcacctgcctttgggccacccccaaattgtgcaccacccacccggtccccctcctcaaatcccctctctccctaagcctctcatcctcctcctcaggggctggcaagctcggctgctgcaatcttctgcctcctatgggagtacccccaaatccttgcctcacctggtccattccctcaggtgatcccatgccagggccccagccctctgacaacttccaactacctccattctatatgactgaaccctaaattaacagttccctcaaattgagagagcatccctaaatgcagccaccacgagatgcttgttctagagtctgaaggcccaccccttccctgccagctgacacccccagatcagtcaggcactcacaaccaataacctttaccccatgccaggagccccccaaaactggacaaggcccttggaagccagcttttccctggggaggaaagaggaaccccccaacatagcccaccttcccacatacaccagcaggactcccttatgagccaggcttctccttaaataagtctccctcaaacagcgctgatgaacccccaaacccgccaggccccccgaaccatggaatatcctaaattttccatatccctacaggtacaaagggatcactccagggggcacctgtggccaaatcctgcattttctcagatgtgaaccccaaaactaaattaagacccccaaatacatcttacttctgatgctgccactccaggggcgccagtcccagataaggcctactaacccctccccacaaactcataccctccccccagtttatagcccccccatcatgcttaccttggttgtcactatacagagacagtccatgttggggggcctggccgcggcggcgggtaaggggctctgacttcatcggagtttcgttcctcccctccgtgggttctcacccctcccccctccgcaccccacttttgcagggggggccaggatggggggaggggtgagaggggaaggagggggttggagaagggaaggggaggggagcgtgggagggaggggaagggggccctaaaaggggctccccagtggaggggagggggcttggggagcacaccccgattctcaggaggggcgggggcaccgggggctggcagccccggagttcgggggctggggcatgagctggggtgggggaggggaactggatttcggggagccccggggtaggggggggtcttgccaaacggccaggggctaggggccgtggcgggggagtggggtgggggggttggaaacggcagcggccgagggagccgtggagccgaagagggaaggggagagaggaggagagaggaagcagggggagggagggagggagctaggagccagaatggggggggtgccttggcagagttaactccttctgtgctggcaggaacccggataatgggaaaggagatagaagcagaagcacagaggcccctgaggcaaacatggagacctggccagccaccagcgatgacagcaaagacgatgaggctggatttcatttcttagagaaggaagcatctatagttgggctgggagcacccacggttatttgaatacgggagggaggcctctcggcaggcggtagggggtcgggtgtgagggaggagctgaaggaggcaatccctgggggcctagttctccctcaggtttctcagggggaaacctaaaaagttaagccctagactctttagtgcctgaaactggggcagccaaagaaaacgaggaagaaagggagagtgggtacaggaccacagagagtgcattctcggtgccccaagtccctgggccactgactcaggcttttgtcagcagggcccccaagattccaggtaatattagtgatatttggctcacccctccagccctgcctgcccctcaggaagttaggcgctcgcccccacctccttacctgactctctgagagggaagcctcataatagtccaggatgtctgtcacaggaacagaactgagttacctccccaccccaggcctctccaggcacatcacccctgtcatcaccgctgctggctggctggcaagggaggagccctttcagccaaggctggtccacactcatggaggacaccataggcaggaccctgcatggtgctccagcttggaccaaatgatctctgggctcccaaacagcccccgaagttcagtaatggcccttggaggcccaggtccctcagaaaacgggctactcacccagcaaggcctggaagaggtcgctatgcagcactgtgaggagtgggggtgcccaccgcagcagtgggggtgccaggagccagagggctgacctgggagctagtgagatgcaaggagaattgggacagggaagatgccaacacaggaagatgaacacactgtcacttcatctccccagactgtgcccttcaccccagcccctacggaaagatttggggagaaggatctccgagccccagccccccacttcgctcccagacctcccctccacaaggagccctgtttttcacctcttggtctctgggacatctctctcttctctcactttaatctccctaatcctccaggattggagttgagctgcttctccccactaaattccagctgtgagtaaagtaggccgtctctgagccgaccagctgtcccattcccccaggtcccaaggcaccagcaccgccaccatcttgctccacacaccctggccccctcttcccataggcaggcagaacctagccacgctctcctgagaagccagcaaagagggcctcctcacagagggctccagcagctcaaaaagaagctgagcccagctctctctcctcctgggcctcctctcaccccaatgagaattgcagaaaaaggggtagaaattgtttgggacttcctgccctagggctagagaagttggggttttacgggtaagaggcaggagaattcctgcagttcctctcaggcccgggaggaatccatctgcctgggcacatggtctctggaaggaacagagggcaaagacagaagggaatgttcaggaaggtctcagaggctttactaagggaggggcagtgaatctgggggggtcttcctactgtgaaactgtagctgttccaagagttagtgaatggcctacatctcagaagaatacacttagggtactcacaccctagcttgggtgccccccaccactgtaccctcccttttgtgttggccgagatagatttcatcaggaaccctagagtctgtctttccatgtctctgcctctgccatctaccttacacttctctttccctacttttcccttctaaccccaccggagaagccctcccttcagtccacctccatccctctggctgcagtgacttaagccccttcctcttctgtcccatcctatcccatcaccccgtcggaggactagactctaggtcggacgggcgggattaaggagtttgggggagacgagggacgcttggagatccctctaagtcagcggaacgcagggccgggctccagggaactacagctcccagcatgccccggggcccgcaaccgtccgccgcccggtgcactgtggacgatgagtcagggttaggggcgccaggacgtgggcgtgcaggacgccagagctgggtcagagctcgagccagcggcgcccggagagattcggagatgcaggcggctcggatggccgcgagcttggggcggcagctgctgaggctcgggggcggaaggtctgtgtgtgacaagagggacggtgggcagcggccctgggcaccgggccggcactgaacccccactccccacagctcgcggctcacggcgctcctggggcagccccggcccggccctgcccggcggccctatgccgggggtgccgctcaggtaagtcaccgcagccttggcaagggggtgtgggagcggcggtccgcttcggcgcccgccatcggcagggatctccctcttggtgccaggtacctgcctactgctcagtcgccgaaagtaggggaaagggcaagccagggtgccctagggcgaaactaggggaaaggtcaccgcttcgcgccgcctccccgcgcggctctcgcctgttctccccttgacacagcggaagtcccttccctgaacttgctaaccgtctcttttcccagctggctctggacaagtcagattcccacccctctgacgctctgaccaggaaaaaaccggccaaggcggtaggtagccccgaggccaggtggaccttagccagacccaaccagagccctgaaatttgcctctctctgcccaggaatctaagtcctttgctgtgggaatgttcaaaggccagctcaccacagatcaggtgttcccatacccgtccggtaagggaagggataatcagagctgggtggggccagggtggtttcccctgccagcctggcctgaccagcctgtcccccaccctctgcagtgctcaacgaagagcagacacagtttcttaaagagctggtggagcctgtgtcccgtttcttcgaggtaaggaatgactcggggcttggtccctggtgaggtgtttggagatgttaagctcaaaaggagcctggatgtgggatcctgtgccttccccaggaagtgaacgatcccgccaagaatgacgctctggagatggtggaggagaccacttggcagggcctcaaggagctgggggcctttggtctgcaagtgcccagtgagctgggtggtgtgggcctttgcaacacccaggtgagggcgccctatcgccacatcccagtatgccataccccagcttggcagactcagctcttttgccatagacctagagactagggctaaggtctcttctaagcacctgccctgggtgcctgtgggatggatgttaactgtccaaacataacacaatttacatgcagtcccctaggcctgagccatgggcctcaccctggttcccaagtccttacaaatctctaagttggggattgcctaacaatagactgactagtagcaagtcaccctcctacctagacctaagacagaccagcattctctgctgtgccctttgcacaccccacttcttttctacacactggggatggcccaggtcaggcactgccctaggtcaggaactgccctaggtcaggaactgccctgttgcccacactctcctgttaaggtcaggtccccctgcagccagtgacaaccccagattcctgcttcccctccagtacgcccgtttggtggagatcgtgggcatgcatgaccttggcgtgggcattaccctgggggcccatcagagcatcggtttcaaaggcatcctgctctttggcacaaaggcccagaaagaaaaatacctccccaagctggcatctggtgaggcaaccctaggagagccagggattggggggcacactgggcttggcacagattaggccagttggcacttagattatcagatggctgagcatttcagttgggggaaggttttggggaggcatcacagtgtgctggttgggacatgcaaaagaactggatactcccaggtgttaagggggaactgcctgctggagggatggggaagtgggccgaggggactttgaagctcatcagaacttggggtaaagtagctctctccccaacaggggagactgtggccgctttctgtctaaccgagccctcaagcgggtcagatgcagcctccatccgaacctctgctgtgcccagcccctgtggaaaatactataccctcaatggaagcaagctttggatcaggcaacctgcctcccatttctccccttctcctccgcccaattccaggccccactgctccccgtcctccacgccctgaatatcccattcttccacagtaatgggggcctagcagacatcttcacggtctttgccaagacaccagttacagatccagccacaggagccgtgaaggagaagatcacagcttttgtggtggagaggggcttcgggggcattacccagtgagtgaatttgggttgggggagcttaggactgaggggcaggactgggctcctgggcagatggctgttgcaagtcaccctggggacgtgtgcaaaagccaaagcaggtggactgaatgtggcctttgggactaatatgtatgcaactgagctaaagttttggctccagcaaccaagtccaacacaaaataggacatagccaggcctccttagccctcagggcctgaggggaagtggtggctgtagcctctaatagtctagtggtcgtcattcctccctggtgcataaggagcgaaggagcagtttttcccccagtgacaacctgttgaacacacctctgctttcccacactgccctgacacagtgggccccctgagaagaagatgggcatcaaggcttcaaacacagcagaggtgttctttgatggagtacgggtgccatcggagaacgtgctgggtgaggttgggagtggcttcaaggttgccatgcacatcctcaacaatggaaggtttggcatggctgcggccctggcaggtaccatgagaggcatcattgctaaggcggtgagtaccctgcccgagtccctaggtaacccaaacagaagtctcactgtcccccttgccatgtgtccctgatcacttgcaggcactccctacactagaaactcctcccctaccagcagcccgacttgctagcttaggtctccatccagcgtagactgaactctggttgtatgcaaaacccatccctctggcgcaagcccagcccctctcctagggagactgcagaaccacactgaaccacagcgggatgtgtggaccctcttccaggtagatcatgccactaatcgtacccagtttggggagaaaattcacaactttgggctgatccaggagaagctggcacggatggttatgctgcagtatgtaactgaggtgagggcctcccaagcccctctccctggagccctggggctttcttcccagtcgggtcagactacaacccccagcagcacctggggcagtgggtctccagctttacaccaatgccctaggggatgcggggaggcatagtcagctcagcttctgcgaagagagacagcaatgatgttctgctcaggtgcctgccagcagtaccagaagttaattctacctcatcccttacatccaccccttttaagaaaacaaatacctggaagcacctgatgaactgacccagaacaagtatctgcctgacctgacaagctaggtcagcccttatcttggagatctgggtgatgaggccaagtctgacaaagccctttgcaattttccttcccatgtcccaactatgcaacctcagtccatggcttacatggtgagtgctaacatggaccagggagccacggacttccagatagaggccgccatcagcaaaatctttggctcggtgaggtcccaggcatgctgggagggagtccagtttgggtgctcagctcccaaaaccagtctcatctgttctttgtccctaggaggcagcctggaaggtgacagatgaatgcatccaaatcatggggggtatgggcttcatgaaggtacaggacggtcttctgcagagcctcggctgggccaggggtgggtaggcacatctcagcacgggcatataatttgtgtggccctgtgctaggaacctggagtagagcgtgtgctccgagatcttcgcatcttccggatctttgaggggacaaatgacattcttcggctgtttgtggctctgcagggctgtatggtaagacagagaattgggtgggggtagaggtggggaggacagtgagtcctgactgctggaccctcttcccccataggacaaaggaaaggagctctctgggcttggcagtgctctaaagaatccctttgggaatgctggcctcctgctaggagaggcaggcaaacagctgaggcggtaggcttagggccagagccaggggagggcagggtggtgtatggcaactaaccagtcattctccctcttcctctcaggcgggcagggctgggcagcggcctgagtctcagcggacttgtccacccggagttgagtcggagtggcgagctggtaagtggccaggggtccaggagagcctgcatcagggactgcagccgatggcccctctgagccccgcactgtccccatctcttaaggcagtacgggctctggagcagtttgccactgtggtggaggccaagctgataaaacacaagaaggggattgtcagtaagtgagctctacaccattccgcccctccctttcctctccttgagactaatgcccccacccccacccccaccccacctaccggacagatgaacagtttctgctgcagcggctggcagacggggccatcgacctctatgccatggtggtggttctctcgaggtgaggaggcaggcagggaatgcctgagccgcagggggcctgggcctggatcccagccggcccagatttattttcatctcctgcttcctgccagggcctcaagatccctgagtgagggccaccccacggcccagcatgagaaaatgctctgtgacacctggtgtatcgaggtgagactcggggctgccaagctcaggtgagggctggaggtgcaggcccaacccctccttccctctccccaggctgcagctcggatccgagagggcatggccgccctgcagtctgacccctggcagcaagagctctaccgcaacttcaaaagcatctccaaggccttggtggagcggggtggtgtggtcaccagcaacccacttggcttctgaatactcccggccagggcctgtcccagttatgtgccttccctcaagccaaagccgaagcccctttccttaaggccctggtttgtcccgaaggggcctagtgttcccagcactgtgcctgctctcaagagcacttactgcctcgcaaataataaaaatttctagccagtcatgctttgctcctgtgtgacggttctttccccctgctgcctgcctccctcccaaagaaaggagccagaggcgtggggagtttgcctctattgctttatttggtgttttatacaagtgactaaaataaatagagtaacaaaggcagctacatggcccaaatctcccagcttcctcaggctgctgtctaggatgcctaaccccggggtaccgctgaccacccccaaccctgcaaagggcagggctgtgggtaactggaggaggaggtcacattctggggttagaaggggcccaatggatgggaattcttcatataaaagaggaaatgcctattaaaaaagtcccaaaaatgtaagaaactctattttaacccccaaaaaggcttataaaaaaacaaagctaaaaataatcaaaggtcccttgtctacccctgagggaagggggaggaaccaggcactgctggtgagagtcacagtggccacaatctcctgtatggcagcagctggtaggctgagcccaggcactgtaagagcaagcacatgacggccaggacacccagtcacacaccaggagcgcccggcccagcctggccccacagtgggctacataacatccacaaagaactcgctgggattgcccatggccatgtggaagctttggcggctggctgtcagttctgggggcacagagcccaggtctctgactggaggggcccccggaggctgcactgctggagggactggaggtggaggtgggggcatcatgaccaccatcatggggttgtaggggagggccatgccagggggcggtccatagggatggagccctgggtgggctcggagattaggggcacccccagttgagcctctggatggaggagggcccccatcgctagtcccacttgcttccccaccccgccgaaggctgccccctcggctggagggctcagactcactgccactgccggacttggactcgggggcccgctcctcgggcctccccgtgcgccctgcccccccatcactccgtgtcgacccactgctccggctgcctgtggagggaggggaggggcaactgagtcctcacccaggctcctccctggctcccctctcatccaccctcagatcctggccgtacaggtatgtggggatgacttaccctcactatgctggctgctggcactgcccccaccataggtgtaagatgaaagctcatggtagggtggaggctgcgggctgtaggggtgtggggcagggtattggtaggagaaagtgggcagcaggggccagggggtggccccaggcagaggagccagggtatcctggtctgaagccccactggagccatcgttgtcattgagagacaggttgactaggtctggaaagcaagggaagagaggaagaaatcactgcttcaagaggctagggccccaagacaccgaatggagaggaactgggaacagttctcccagacccacccacgatggggctcaaaacaggggttcacaagggtctctgacaagaaactcccatctacttctgccatgagggcaggggcacagccactagcccacgtctttgcgggactcaggtaagaggtgcaccttcccccggtggacacagtcctgcacctggcacatggcttgtccagcagcacatgggtggacgtcagcccccatcctcggccagtgcaggacctagtgcgggacacacactgctcgaccatccatggtggccctggctgcggtttctgggctaggtctagggttggagaggcagaacaaggtaggcaaagccacactcccagagttggggcagggggacttacagctctcacagccaccactgaggtctccgaagacgtaatagcactgctcagagaaggtgatcttgttgacggtgtgtcggatcaggcctgctttgagcagcccgctggcatacttgcgggcctcccgccgctcaggaaagccctccacgtgatggtagagccagtcaaccacatccgagcctgggagcacccacagtggaaaaaggcctcaggttcttcttccaactcctgctctcgcctctgcctgtgccattcctggctttggtcaccacctcctccccttctccagccacctgcccaggacccagccatacccagaaaggcattagggatggtgatcttgagccacatgcggtcccggacttccagtccagactctggagctgccatggccttggtcaccgatgccatgtccgtatggacggagagaccccggccttcacagcctggcagaggagacaacgggtaaccagagtcagggatcgctcccacaagggcaatggatcagaccactgcgggacagccttctgctgggagggtgggatgaggtgggctggcggctcaccatcaggcaaagacgatccagatgtaatggtgctcatggaggaggaacctggataggctgggaaggtgccagtcagagccgcggaatgggacacccaggcagcagggtcaattggctggatgggctcatctgggacaaagatggcaccaaaatgacccattctcagtccccaaaagccagcccagtccctccctgactcagcctcctgttccacctctgcctggaccctcctcccacccattccccatgaccacaggcccggccccagcctcctgggcagcccccacccccaacttcaggcccctccctgagtgtcactcacttcgggggagagtgaaataggcctgaggagagggatcccagcacttggccacagtcagcacaatggggctatggggaagagaagtccagtcaagggcgcaggggaagaggaggcctcaggagggcgggggtctgaagcaaggatggattaagagacacaaagagggggagaagcaagcacatcgcggctgggctagagaaggtgagggtggaaggcaccacaatgtggatgactcatcaacatggaaaactcttaaaaacatactgccaagtgagacaagagagtacacgctgtacagttccattcacagaaagtccaaaaacaggtaaaacgaaactgcagtgttcaaggatacgtgcaagggtggtaactatccagtgaggcaaagcttttctttgttatggtgatggccaaagaagtcaggagagtgactacccctggggcagtgaggcatttgggagcaggaagggacatctgaggaggaagttctagggtatcagcaatctcctatttgatgatctagatggcagtgacatggatatttactctagtattatttgctatgtcatgcatttgtttcatgtactttgaacgttatgtcttagcacttttttttttttttgagacggagtcttgctctgtcgcccaggctggagtgcagtggcgtgatctcgtttcactgcaacctccaccccccagggttcaagtgattctcctgtctcagccacctcactagctgggactacaggcatgtgccaccatgcccacttaatttttctatttttagtagagacacggtttcaccacattggtcaggctggtctcgaactcctcacctcaggtgatccacccatctgggcctcccaaagtgctgggtttacaggctcgagccaccacgcccggctgtcttagtacttattaaaattccaaaacaaaacatgaaagagaaaaaaaaagaggactgaggaccggcaacctgcttggcaactcacccaggcttgtgcacaatgtccctcagcacccgcacagcgtcatcgttgctcatgttctcaaagttcatgtcattcacctggaagcgacggcaagtgggtcagagacacggtgggagaggctgagggcccccgtgcagggcagctcagtggccctaccccagcacacctgcaaaagcatgtcccctggctcaatgcgcccgtcggccgccacagccccacccttcatgatggagccaatgtagatgcctccgtctccccgctcattgctctggccaacaatggagatacccaggaagttgtacttctctgtggagagaggccatgtgaaaagaggagcccctgccacaggacgcccggaaccctagagaccaggccctccccacgccctagccacaggctctccccatacccatgtttagcgtgactgtgatgatattgagagacattgtggaatctgtgacgctgctgaaggatgacgtctgtggtgggaaaaggagccagagtgcccttcaataacccagggtcaaccctggggtgctgccggtgtcctggcaccgcccaaaccaaagcccatgccccaccttctcccagcaccagccttcctgtaggaacccctcaccctctccaggcggggtggcctctgcttccttcgccgccggtggcgcttaaggaggcgggaggcactgctctgctccgtggagctgctgaacctaccaggaggttgggaaggagagcaaacgtaggccaaagtggtcatggggccaagagaaagaacaagaggattgactggaagacgagacggggctgggtgcgctggggagagctgtgcggagccacacctgctcatggtgtcctcctcgtccgagtcccccaggctggtactctccagctcgctggtcatgagggtagaggagctctcgtatccggccaggtggcgctccagccttgaggggccaccagtcctgtggcccccagctacatatggacaggaagctcaagaaccaagcttccccctgctcaccccaccaaggctggggtctggcccagcccttcccggcccccaggcctgcccctcaccgccatgctcactgctgtctctcctgcgaggccgctcccgcctcagtgacactactgactcggtttctgtctcaggctccagattctcatggctgctggacacattagggctggacaggcagagatggtttccaacccacatcaggagaacagggctccggatcctaggcgtcccctaccaaaggcctgggttccctcctcacctccctcccctgcagtcaagaatctgaaggactcactggaaggatggaggccttgagtccccaatgccgctggtcctctcgggtggcaaaggaggtaaaggtggggctggaggcgccagttctgcccgaggctcatggactggaggggccatctcgggttggggattatctgaggacaccagctagaagggtgcaaatgataaacagtggctcacttgggagtcagggtgtgacaggtggcagtaagtgaaagaatgagaaagggtctcagagagctggagaagagcaaaaaaacctagcaagtattagagactccagaaggagaaggctgagggcctctcgccggctctccaaacagacaggaggtaaagagccagggctgctaacgcgcggcctggggaggatacagaaacagactgaggcttgagggagcttggcaatgctgagggggcctggtcctcggtgtcagaacctcttacccaggataccacccttccgttgaagcaggggaggcgggcgttgtcatctgaaatttcttccttcaccaccctgccaagcgacaaggtagaggtcagtgagctggaccaaccatccccaccccgacccccatcaaactttctcccaatcttcacctggctccaggatgttgactttctcctgccctgttcaggtcttctcttacattgaaagaactcactccgacacctaagaaatctccaaactcaatcccctttccttatttctcctctccctaacgcaccctcaggggcacagtgctgctccaaagacttccttgagtctgactcaaacctcttagtccagtttcaaaagcaatcccgcacgctgatgcggctgcctgagatacctatctaatgagactggctggtggcctcctctcaaccccacccctgttccttacaaaccttccaaaaaggtcaggcacggtggctcacacctgtaatcccagcactttgggaggctgaggcgggcggatcacctgaggtcaggagttcaagaccagcctggccagcatggtgaaaccccatctctactaaaatacaaaaattagccgggcatgatggtgggtgtctataatcccagctactcaggaggctgagatgggagagtcgcttgaacccgggagacagtggttgcagtaagtcgagatcgcgccactgcattccagcctgggcggctcaaaaaaaaaaaaaaaaaaaaccttccaaaaaaggctttggtcctcatcaaagcctctactcttatactttcctttagttttctctaattcatttctagaagactgtcctttcttgagtaaaaacacccattagaggccaggcgtagtgactcacacctgtaatcccagcactttgagaggccaaagtgggcagattacctgaggtcaggagttcaagaccagcctggccaacatggtgaaaccctttctctactaaaaatataaaaattagccaggcatggtggtgcacacctataatcccagctactccggaggccaaagcaggagaatcgcttgaacccagtaggcgaaggttgcagtgagctgagattgcgccgctgcactccagcctgggcagagtgagactccacctcagaaaaaaaaaaaaaaaaaaaaaccacccattggatcaaacaaacaatggaagttcctcattagactgaaagctcccaaggagagggcaagctggggttcccattcccctgtgcctcactgggcacaaaattctgcacaaagcaatctgctcaacctgacagatcccaaagcccagccttggggtcatctctccaatgggttccctgtggtggaccggacttgccccttcttcttgaccatgacatcaaaccatgaacacttactctggtcaacaccatgtcctagccacacaccacacactgacacttaagcattaacaaatactgtcgactaaatgaataaacgtataaagcatcagactctctaccctagttgttcctctctctctttccacacacaaccttagccccaaattaggacaccttgtctaattaacccgttagcctaatatggtcatgggagccaggatatatatcaacataatccatttgctgtcaacgtgacaacacagcccagtcactactaacccgtctcagcataatgtaggattcttcccaacataacacaatctcagcacagcttggtccactctgaggcaaattattctgtatcaccataacctactttacagagtggtcagcctcaatgctaattacaattaccattcaccaagaatttcccgtgtgccacacacgtgaactaaccatttcattctgtgattttctccatgtcacagatgagatcaagacacaaaatttaaataaattgtccaagattacattgctgacaactagaaaaaccttgccttaaagccaagataactcccaagatagtatcagcatccccatgtcaaacaatctttctagctagagtccagtttgttcagttcttctaaaacccatgctatcccaacttaatccagcctgccttcaaaaaagcagaggttgggccgggcgcggtggctcacgcctgtaatcccagcactttgggaggctgaggcgggcgaatcacgaggtcagaagtcagagaccagtctggctaaaacggtgaaaccccgtctctactaaaaaatacaaaaaattagccgggtgtggtggcggacgcctgtagtcccagctacttgggaggctgaggcaggagaatggcgtggacccgggaggcagagcttgcagtgagctgagaatgcgccactgcactccagcctgggcgacagagcgagactgtctcaaaaaaaaaaaaaaaaaaaagcagaggttgaggacccagaaggctcagccccaaagaccataaacacaaaagggctttctctgcattatttacacgccaatctagtccaagatagccctgaatgtcccaaattaccctaggatagcccaatctattctagcacagcctacaatgcccccacacgcagctgtctgcaccagtctagattggaacatcccaatacggctgcctgtgctagcacaggccccaacagccttgtctgcccctataccgagtgctccaataaaaccaagtcttgccccaagagaaaccaggattaaccaatacaacccagtagagtccataatggcccaagtgttttttgttttttttctgagacggagtctcgcactgtcgcccaggctggagtgcagtggcgcgatctcggctcactgcaacctccgcctcccaggttcaagagattctccctgcttcagccacccaagtagctgggactacaggcgcgtgcccccacgcccggctaattttttgtatttttagttagtagagatggggtttcaccgtgttagccaggatggcctcgatctcctgacctcgtgatccgcccgcctcagcctcccaaagtgctgggattacaggcgttacaggactcctgagaacgtactaaacaaccagacaatggatcaatttactcagtacagactagaatactccaacataaaccagtatgcccccacctattccagtaaagcctaatcttgtctaatctggtttaggatatcctagtctgtccgtgtgcctcaatctatccaagcataaccttgtccatcctgggatagtcaacctacctcagcatagtacaatctgctccaccataggccagaaaatcccagtgtggcccaaagtagacgtgtgcccctccatgtcgcccaatccactctagcaaagcccccgccggtcctatctaggccttgcgctcacccgaaatcctgatccatagacttgaaaaagtacttggcgcccgcgggccgctgcaggacgctcttgaaatcgccgagggtgatgcgctcggcggggacagggatcttcaccaggtagggagtctcttcctcatccaggtggtaaatcaccttcgtctccccaaccccaccgcccccagtgctgctacccgccatggtctcgcccgcgcgctcccgggctccaccgcccacccaaagggctaatggcccctgccgcgcctgcgcacacccgcaaaccgacgcgcgagcgcggacaggactgacccagtacgggagagaagcaaaggggaaaaagcacggatctgcgagggtggcggcggggggcgggccgcggggtgcgactcaaagccccggtctcagcggccgccgcgcgccaccgccaccgacgccgcgagcttcctccaggtacccgcccacctctcctcatgtcacgtgacttaaaggcagccaccccgcgctcctcagccgccctccgtcacgtgatcccctcccaatcacgtgaccgtctgactccgcctagtgcccccgccacatgatcgctgccttcagcaacggtctcccagcccccaaacgtgtaccccagccgaggtcctctgagcacccaggctaagctggcctgtgccttcaggaaacggaccatcggctcccaccccgctttaccccacccacgatggagcacgaagcaactctgacccgcaggagtgtgcgtgcagggagtgaaggtggggactgtgggggttcctagactcgagtggggagggccaaatacaatgaaagctctaaggtggcttacttgtcttggggtgggaaaggcccagtgctgtgatatcttcagattggactttgagacgtgggtttcagccccacctccagctagtcttcagccaccaaagcctccctcccgagcaggacagtgagggctataaacacaaaagagcccactctgctttatttacaacacgcaggctgtctgtacaaacagcggccgatattattaaaaacaaaagaggtgagtgagaatcgtcacctttctgctttccttcctcacttggccaggctctagtactccacctttgagctgccatgcccaataggggaagtccaaaattaaaaatacaaccggtgtagaagaaaataaatggggagtgaaatagaagaaaagatgagggaggggagtgctaatatttacactagagttttatagacaactgtcccattccatcccaattccaatcctgacccagaaagtgatggtggcaggtccaagagacagagattatgtgtcgggacacagacagcctcccatccccaaccgtaatggattcaatttcaagtccacagagtggggaggaaggatagggtgggaaagtgagacactcattttcaaacaagtctcccttgagaattcctgccttgaagtgcagacagtatccaagctccaggggataggctgaggaccctgaggctcagttcccaaatcatgttgtcatttggaagttccaggctaaagttggtgccatcagggctctccagatttgggaggcccccctaaccgccgggcctctggcctcagttccttgcatttctggcaataaaagaagtcggggacgttggtcttcttaatcttagcacaggagaggtggatccacgtcccacacaggctgcactcaatcatgggccgccctgcaaagggctttcgacagtaacatgtgatcagatcccatgagtcatcacctggggaaaaaaaggtttgtttggtattctgcctgagctgttggatccacaacaccctcaaacccctcgccccagcccgaacctctcacctgattctaccatgatgtcctcgtccatgacccgcatctcgccttcactggagctggcatctccatcttggcttgtttcagtgctgcccacctccttgctttcactgtcagcaggagggactccttcagggtgcactgtggcagggggcctaggagcctcagggggtgttggcagcacagggactggggcttcaccccctaccactgttgccatctcttcttcttcttcctcttcctcctcttcctcctcctcttcagagtctgtatcactggggggtgcctggggaggcccaggaggtgggagtctatccccccgttctgccttttttaacttccgcttcttgctcttcttgattcgagatctcttttccccatccccaggagttggccgaggcctccgaagcaccccaaagccagccccagctcctggccccaactttcggttctttcggtccttctttcgaggaggatgggagaggtccccctgggaaaggggcacgggggtaagagcagcagggggccgggaggtatgtgtcagggatgtgggggacaaaggagatgccactttgggcccatccagatcaaagagagagtccttgagcttcatcttctcaagcaaggtagcactgtcgggggcctgcagacgagagaaagtggaccttgggggtcctggctgggtgggacctgcttgagctgcccttctcttggatgactttgctttcttaacaaaagtctggatggttcgaagatctgagggggccgagtcccagccatcactgtcggccgcactctctcctcgcaatggagagctggagccagaggctggccagtcactttccttaaaagggggaagagaccagggtcagcagaaccccagtgtcatctcagcccctccacaaacccagcttgaaaaggagtgactggatttaccccaaaatgtcctacctcaaccactaaatcccactgtactccaaaaacttctccccaccccaattcccatcagcatgtcctcttgaccagtccgtgttacctctaccctcaagtctgacacctcaccgctgcccctgcccagggcctgtggaacactgtatcacccagaccggagccgttatgtccttagctctttttctgtatagcctcatttgttaccattttcatctccctaaaatttatccataaacaccttccattcacagcacctcaagactatgccaaaatctcaaccagcgactccaaatcccccttccttttcactgctgttcaagctagctatcccggccatccactccccgcataccagctttcctaccacagccctaagagtctccaacttccctggtcttacatataatttctaagggcctccttctataaagcaatacagttctgtttgaacaacagtcactctatagtcccaccacaccagcctcaagtcagtaattctcttgcccctacctctttgctagggggaatgtaaccagcatatgccaaaacaaaactgcagaatttgttgaaatcctcaattgttctccgccgtttctctggtggctgaaaggaaggagatatggatcacatgcaaagccacacagtttaagaatggcattcccagaaacacagtccctaagtgaggtctagaaaaggggggcggggggcgttgtcaggcagggctactaggctgcaaaggtaaggcaaacctcacctgagtctctggcttaagggtcggaggtggatctggaaaagcaataaaagctgagtcaagacactaggaacaatctgtgtaaaactccccctctaaaccccgttgttcctaagtgaaccccctgctctcccaggtccctctgccaggccagcaggcccccagctgtgttggatccgccccggctcccccttccgccccgcgaggggcggagcctgggcgcggcgccctctgaggcctcgctatagcgctccccttcccccaaccggaggcccggcgccccgcccccccaactcacggtctctctcgactccagtctactcggatccctcagcgccccaccccaccgtaccgctcccggggccgcgtccgggccgccgccagccgcccccgtccttcacacgcgcccggagccccgagttcctacccggccgcgctccaccgcctcgggccctccgagaccgcacacgccgcccgccagcccccagggtccaggatgaccacgccgaaccgctccccgccctccggccccttctactcgagcacgcggcccggcgcgcccctcacccccaccccagacacacacaggcacacgcatccaacgctacttcacggccgggacagacccgggagctctaacccggacgcggcccccacctgcccccccccccccgcccataccgcgctccccacaatttcgccgtccctccgcccccatccggggctttggcccctccccgtctccagcttttcgggctccccaccgggccccccggccctgttcctagccctctccggccgccgcccccccctccgcccccgtactcaccacccagttactaggctatggacccctcaactctggccccttccccccaaccagccactctctctctctctccacagcagccaccgctgctgccgccgatgcccccctcaccctcagcaactcccaggctcttaaccctcgcggaccaaccctacccccccgcccgacaagtcgccggtcttaaccccccccaccccgccccaccaccccctacaactacccagctcgcctcgcttcctggctcgctctctccacaactaccccccggtacaggtccgtctgccgtagacaatacccagaccccctcttctccccacaactacctgcccacctctccgacaatcaccgggcattctccggcggcaactactcggagctccggtaccaccgccacaaactaccccacctcggcgaactaccgggcccctcactcagcctcttctacgtcctccctcctgagcaactctccggccactggattcccctaaccttccagttccagggccccaatctgccggtggccctttcgggccctaacccccgaggctccgggtttcaagctcctatcccccgcacccccacaccgtctgatctccaactaccccagcccagtttcccactcctctttctccaaggtctctcaactcgtcgctctcccacctccagggccagcctcccgaccccctccccgaactcccccgctgggctccggggctcgacctccaagtttgccaattgattcctcgcccgccccccgccggctcagcgctctgcaccggtcgagagctcaccttcgggactgggctccgccatggcttccagcatcgccccctcccctcctcccggtccggcgcccccctccccggagccggggatcccggtgccgcctctagtgctcgatgctcccactgcttcgctccacagaagtgtccgcctcagcccggttgagactcgagtccgctagccgctgccgccacctccctctaccactgcctcccgcactcccggaccgggccccctccccccgcgccgccggccgcctgctccctcctcctcctcctccacctcctctctcctccctccctcctcttctctccctcctccccccgccggcgccgaggcgcagtgcaccaagggttttgtagtccgtccgggaacagcggaaaagggaccgcatgaacctccggaactttgattcccagaaagccacaggctggcgcaggcgcaccaagccgctcccctcccccggggagcggcggggagaccaggagccggaggggagagcggaagtgcgcgcgcaggcccctgggagatgtaggctgggcgggaccaagaaagaagaggaagaagggattagaactctcggccaccatactgcctcgttctgcagcttctttctccccaggaggaccgccccacttccggcctgccggagaaatgattgctgggagttgaagtattcctggcgataatggctcccgctcccagtcttctccctccctgattccactctgccggatcccacacaccggcaaaagtctagccaagtgacatgcaactgagaacagccgttttactagcttgcacacatgaaaatatcttagttagaatgttctagcaaatgtggatgttcacctaaagcaggtacttcggaactttctccacaggaacccacagtaaaaaaaaatttttttttacatgagcatttttaacatttagtttcacatgcgtgttataaaactaaagtttcaagaaataatcctcagtattccattccatcacaacaaaagcaccctctttttgcagacagggaaaagcccaacatgaacagaataaaccaaaatatacttctatccctccagcttgtacccagtactcttctttccccaccactgaaacccactgacaccttggaaagacttaaaatcagcgggacgaggggagcaacacaaggcaaaattcagttcagcttggtggtttcctctttattgatgtgcctcctaccttccccccacaatttcagtcccttccaactacccccaaaaaagaaggtagtgaaaggaagggattgctggggttctgagccccttgggcagtcagaaagggaacagaaaccaaaacaatcactggatgtgacacagactgacaatcaagaagtctacagcaggatgggaaaggcgggcagagaaaggggaagaaaggagaaaggagagttacaagatgccaactccaccattacccctcctaagagaggctggagagaaagccacaaacattaagaagtgccggtcctgaataagggaggtggtgtttgagcttgaaggaggaggaggtcaagaaaggggggccacctctctctttgtagaatgagacccccctccagctcaggggcagcagcttcacagaccgtagacactttcgtcactgtaggcaatgtagagaaagaagtcttcttcatggtgttcctgggatgaaagcagaaaactgttcagcaactgggctccagtaacttaaaccaaccacgacccagacacgttcttctagaaccacaaaccattgcctgactccttcactgactccaaggcctaccacacgagcagtataatctctgcagtcctgggcaaaaaggcctcaaactgttttctgctgctttggaatggggagggggactgggaagagtcccgaacagatagtttctctagctcactgttctctttccttctctctactcctactgttctgtccaaacccccaacccacggctattatgaaactttaaggcaagccaggaagctagtccaaaactactgatgtaacaacactttcttcccctcacgctcttccaagattcctctccaaagcctccaccacttcccagtcaccatacctggtacagctgacccattgtggcactggtgggtggaatgacattgttgacaaagaaaaacaaggcatcctcagctcggagatgaattcgcttccggatcaagaagtagaactgaccaactgcaaaagatacaagatgcaagaaagtcacagaggtcaaaaatgccctcaaaagaacagctgctaggtggagcctcctcccgcagagactgcactcccacccacaggaagcaagcctgagtcttggatcaggttcccacctgtgagatcagaaggcaccaggtatttctttttgtccaggtctcctatccgagctttgggagccttttctactatcacctgataaagagatgaaaattaggagacagaaggaatgcagccccgaagctgcacctgtcaagaactcaagaaacaatattcctagcacctaaatctaccccagattcatctctttgtctttgtacacgcggtgcagcactgagtcccagagatcctgacctcactgactggagctcatttaaatatccaggatccatcccccaatagggcgtcaccataaacaactatcttaatcagacggaggtgacttgtttgggtcgactagtgattcaatctcgcaaccttagctagctggggggatgaccatttgaagctcaggctgtcaaactctctaaggcctcaaatgctaaggtttctctctcctgtccacatccctctcaaccccacatccaccactaccccactcctttcatcctgggtcccaaggacagcagtttcaggctcgctgccaaccccaccacagccagcagcctgatccctgcgctgcctgtcccgatccaaggccaggctgtggcgtcagcgtaagcgtcccgcgccctcggccctggctactgtcctcaccggcacccggtccgggtatttctttcggatcttctcgccctcagagcggcgcttctcgaacggatgctcttctttgtacacgaacttcatcctcccgggaaccgggctggacagggctgggctgagggaacccaggggggccgggacggggggcggcgacgacggcggcgacgcgcgggcggattcagcggagcgatccacgaatttgcgccacttccctattcaccaaccccgcccccgactatcggggactgccccccccgctaagatacgccactacctcagcggcgctaacgctgctagcgtagcaccaccaactgaccggccccctcacgccattagcgtaatcgctttggaatcaatttgtgggctacgcaggcgacgtagcaaagacggttggcttttgctcatcgaaaattactctaaacctattccccaaccgtcccctcaaggaagctggggctgaagaggagtaaaagatggtaatcatcatacgagacttggttctccaagttcctttcgttaacaacgtagaggaacagcagggacaattacaaggttagctattcacgaaccgtgttgctacgctgaaggcggccgttgacaccaaaacaaagtagtacccaagtggcggagatgatctccagaaataagaagtcaaaaagaaaacagatgtttggagagatctacagaacgcttaagtgccaaaatgagtagaccaatagggactggagaggaggttggaaaggtagggactacgccagcgcggaggaacactgcgggacttgagttaaatcatgtgatctcaaagagggcggagcgtcacgtggcgggtgcgcgaagtagggccggcttgggagggcgccggggaggcggggccggctgggcgacagctgggagggggaccgacgccttcccggacagcggaggtcggggcgccagccacctgggggcagcgcccgcttaacctgtccacgtcagtgccccggacgaagcccggtttctccagctctacgccctttggccgtccaggtttctcctttcgtgcttccatagccggtttctcctttcgtgcttccatagcctgcttctccgaaggtgtccttccactccccaccagcgcgcccatcctgtcactcggcccttcccgccaaagcatctggtgtcagcattattgtatcccaggcatctggtgtccgcattattctatccctatactcaacgccacctttccccctgccccttgagtccaacagcagtctcttccccctctgcctgtgggacagggtgcatgtgaacaaagtcccctctcttcacttcccaaaaccccagagaaggacctaaggccgctttggtttcaaagttataatgcatggtttaaaagagagaaaaggaaaaaagacacaaagctggttacaggtctgagggagtctaaggagagaaaaatagagggagagtaaaggggggacaaatttagggaaaatccagtggcccaaaatcccagtatcccacccacagcccagcccttggagcaggagtgaagaattagatcagttttgtacaagagttttttaaaaaaaatcaaatcacaacaaagctgacttggcttctctttgagcctcctggatcaccgtatgtctgtcactctggccagtcctgcctcttcacaaacactgattcggctctcctaggcttccgcctgtgtcccagtctggggtttccatggagtgtgaacacgaagttaagagtgaggctgcttcagagcccctggcccatgtgtccatccagactccaagtggagtgtagggctcccagggcagagaggggtgggaggggcagaccctgcccaggcagtcctcacattggacagggcatcagacggcatcccaagggctcgccctccctttcccccccaccccaactcaggtggagggggagcagctgtcaccagagccgatgttggtgaaggtttcggctcagcacggaacgaacatcagcggtgaacctggggtgacaataacttgcattggtagagtaccttatagttcataccctcacaacactcttgtaaggcagcatcactggagatgtgggacctaaattatcaccatattcatgattagataggttcaatttgcccacagcctactagctaaagtgatgagctttgaagtaagacgacctgggtccaaatgttaaattcttaagggaacagagttaaaacaggacaaaccttttttattccctctgaggatcccccacctcctcctttcttgagatatccaagtgtccagagcccacttcccttacctgagggcatccagcattgggagcaggttgagaagggctgtgtcgctggggtcactgaaccaggatttgatggggatggcattgtctagggtgggtgaaaatgcagatgagaagaaacagaattcaagagagacggtgtttttctcttcttggagggaaggaggaattattgttaaaaatatatgcctcccactaccggaagtcaacaacctaagtaaaactttcctggtttatgctccgaaactaagttttaatcaccagatctcatacctattgatgcttctagtcaagcttactgccattgtgcctcacttgaaacacacttggccaggcgcagtggctcacacctgttatcccaacactttgagaggccgaggtgggaggatcacttgagctcaggagtttgagtccagcctgggcaacataatgagatcccttctctactaaaaatcaaaaaattggccaagggcagtggcttacgcctgtaatcccagcactttgggaggccaaagcggacgaatcacgaggtcaggaattcaagaccagcctggccaacgtggtgaaactccgtcgctactaaaaatacaaaaaattagctgcgcgtggtggcaggtgcctgtgatcccagctacttgggaggctgaggcaggagaattgcttgaacctggaagtcggaggttgcagtaagccgagatcacgccactgcattccagcctgggtgacagtgcgagactctgtctcaaaaaaaaataaaaaataaaaaaattagctgggcatggtggtgcacgcctgtagtcccaactactgagaggctgaggcagaaggatcacttgagcctgggagatcgaggctgcagtgagctatgatcatgacactgcactccagcctgggaacagagtgagaccctatctcaaaaaataaataaaaataaattttatttttatttatttattatttattttttttgagacggcgtctcgctctgtcacccaggctggagtgcaatggtgcaatctcggctcactgcaacctccgcctcccgggttcaagcgattctcctgcctcagcctcccgagttgctgggattacaggcgtgcgccaccacgcctggctagttttttctatttttagtagagatggggtttcaccatgtttgttaggctggtctcgaacttctgacctcgtgatccgcctgcctcggcctcccaaagtgctgggattacaagcataatccaccgtgcccagccaaaaataaattttaaaaatgaaaaaaatgatataagaaatccgacttatgaaatggacatatatggtatctcatttgaaacacaaaaataacttgcatttcgacttacagcaaactagggataatctagggaatcccagctctcaaggaccaaagcccaggtctcctgcaaaaataccttctcagaaccatgttctggtcctgccagactcaccaccttcccccgtacctggatggctcctgtaagcccctggggagttatccaggatcacaatgctggagaggtcactgtggaccacagagaggtccttgatgtagctgcccaactccaaagtgcagtgctggaaggcaggggatcatgtagcaggcctctctccaggatactctcctcaaacccagatccctccctggtggcctccctcccaagccacactcttagactgggattctagcttacctgtctgtaatatctcctcttaagaatgcttctgctattgtccagtttatctgccacagcagagccatagatctccatgcttgctgtaaacaccaccagctcgtaccactggctcacctgaaatagattgggggagagggcgatgccatacaaggtgatgattcctttagacatacagttatctttcagaaaggcaatggcatagtccttcaggccttccatcaacatcaaatgtctctgaggacacgaaattctgaacccccagcccaaacctccaaactcagtgttaggcatcctacactcttatgattcagaaatgcaagaacaaaagagaaagatgccagcggaaaagaattacatcagcacaacaaatgaaccccaagtactgaaagccactcccctaccattacacagcctcccctctagaaaactgctctaacccgtttctcctcaccccttcctccaaatcctcccaattcccagagccctaaaaccattccttcattacagagctccctttagctctccaaaactcaccacttccaggaagaaatccacatggggcctcttatgtacaaaaaaccggacaggatgtttgtctattaccacctacagaggaacaagatgggctgggggatgtcatgaccaccacaacccaggcctagaaaacgccccacccatctgcttccctcctccaggctgacactggtgccagcggatggagacagatgctctgggactgggaaagggagtccaggtttgggcagaggaacagatggaaccatttcatcactccccaccaccacacaccttgaggatgaagtcaggaggcgtaccaggccggactgtgggcctcaggaccccatcatggtgggagtgaataagtgtctcatccagatccagcaccaggatcttcctcttcacctgggctgaaccagagtggggaggaataatattgaccgacctctgacccagagctagcccctacttcaccctaaaggaggcttcccaccacatacttacctagccgattccgggacacaggagataaggggaggatatcatatcgaacagtttggtactgaattacctacaaatagcacaaaagaggattgaaacccttgataaggaagccttccccagtaacagtaacagggagcacataatgaacatttaccacaggtactatgtatgtaatttaggcttatttcttcttcttttttttttttttttgagatggagtctcgctctgttgcccaggctggagtgcagcggcatgatctcggctcactgcaacctccgcctcccaggttcaagcaattctcctgcctcagcctccctaatagctgggactacaggcgtgcaccaccacgctcggctcatttttgtatttctagtagaggcggggtttaactatattggcctggctggtctcaaactcctgaccttgtgatcctcctgcctttgcctcccaaagtgctgggattacaggaatgagccactacgctggcctttttcatttaatcctcaaaacaaccataatattactgttatacctgttttaaggttaaagaaactgaggccacacagctaggaattatcttaagttgtttctctccctaattaaaatgaaaactccatgagaatatgattttgtctagatcatggctgtattcccagtgcctagaacacagtagcaaaagtggtcagttgatattagtagaatcagccaggcgcagtggctcatgcctgtaatcccagcactttgggaggccaaggcaggcggatcacaaggtcaagagacggagaccatcctggccaacatggtgaaaccccgtctctactaaaaatataaaaattagctgggcgtggtggtgcgtgcccatagccccagctactcgggaggctgaggcagcagagtggcttgaacccaggaggcagaggttgcagtgagccgagatcgcaccactgtactccagcctggtgacagagcaagactccgtcgcaaaaaaaaaaaaaaaaaaaaaaaaaaaagtagaatcaatgaagtgatagagccaggattgtaccaatgcagttcaacccaagaacgtgccctctttttttttcttttttttttttttgagaagggagtctcactccattgcccaggctggagtgcagtggcgcgatctcagctcactgcaacctccacctcccaggttcaagcaattctcctgcctcagcctcctaagcagctgggactataggcgcgcgaaccacgcccagctaatttttgtatttttagtagagacggggtttcaccatattggccaggctggtcttgagctcctgacctcatgatccacctgcctcagcttcccaaagtgctgggattacaggcaagagccaccacccccggccgaagctgccctcttaactgtgatattatcctgctacactgaacaaagaaacgacccccacaacgcaaccttcaccccaagaattatttgtagcaactaccatcattgggaactaagtgcctcagattccctagtgcacatggagtaggagtcgggaggagatccctgggtccttaatgggaatatagaatgagggaatccagaggttgtcaggtcagctaagttcctctggctagaagccaccaggcctattttaaccagccacctgtccacttctgtcccttctagccaagtcacaagttcagagaacctcagccctctgaacagtctccttatcctggtacccagggtgaggcaaagaacactggaaagcccctgccaggctgactggcagggtctggaggaggccagagtgaagtcagggccgttaagtgagaggtgaataagggacaaggacgtcaccacctcatccagctctgcttctccaagcattctctaggggctatttcctaatacgcacatctccccatacaaagcctggcaattccctcttccacacttttcttcaaaggtacaaaccctcttcagtgcatacctaggccccaagccacaccagaaccaggttctcccttctaaacccacagggctctctccccctaatcaagatctgcccttcttttctccctgggccatgatgaggtccgaaagagctccagtgtccagccttgctatctcgggttgcatatgctgggcatgtagggaatgctccaagcatctgccagaagcggggtggggaaagaaaccagattggaagggaagggaggacaaaaggctatggggtcagtgctgcccaaaggagagcaattttggaagtaacctgtggatgagctgaagcaccactccgtatgcccagaaaactgatgtgttggagcgagaacgtcagagaagatggcagtcaacccataaagaaaaccgctggaggccgggtgcagtggctcaatcccagtacttttgtgaggccaaggcgggcagatcacttgaggtcaggagtttgagaccatcctggccaacatggtgaaaacccgtttctactaaaattacaaaaattagccaggtgtggtggcaggtgcctgtaatcccagctattcgagaggctgaagcaggagaatcgcttgaacccaggaagtggaggttgcagtgagcggagatggcaccactgcactccagcctgggcgacaaagcgagactgtctcagaaaagaaaagaaaaccccaggagatagccccacacatatcccagcatctctgaccctaaatttttcttggctcctagctcttgtctcgggggaatagcgctgctgcctacagccacaaccatcctgtactgttcgcgccctaaatcaggaagtggaagcagactggtaaaggacagaatgaacccaaggccagacccattctcccaaatcagttaaatcaaccaccactaccactgagggctttctggaaattctctggaccccaggtcaccccaacctgggtttattctttcaaattgtattgaggtatgctaaggggtacagaccacagtacagacccagaacctgtgtctccgcttactaaattctccccagactccttccgaggattctccctggtggtggtgagaccacaagagcacattcatttaaagtgctgttagctgaaggacctctgaccttggagaaaagctaagggagaggggacccagagatgcttgggtccatccggacagtttccctcagaatgctaggctctcctggagaagcaaacgtcctcattttcaagccctacaactgcccagcgctgtcctctgacagggacacccaaacttcaatggtgggcacagcacccaccttgaactccctcccacaattaaagaggcccatcgtaaaagcatctgctttagtcttcaataaatccagatacctacactcacactatgaaataaattttcacagcctttttggaggaattctcttaatgggaaccgcaggcgtttctccttcacacccagggctttcccaagttcccgtccttgtttgtaacgtatgccctcccacccacctccacccttgacacacaagtctgtctcttccttgttataggaccaaacacacaccgaggttccaaatagggtctttcccaagcccacatccacagatccggctgtcatcaaacaggtgttccccgcctcttggtttctttagcaacaactccagctttcttaaagagcgccccacccaccaccttagcccccaagagttgccaaatcctgtcccatctagccccatcaaaacccccaagggcaaggttctattacaagggtctcccacctcgccccgcttagggtgcccaattctctggcgagaaaagccccagccaggattcccttcctaggcccaaacagaggcccgacactccgaaaacccctgagcaccacggacagatgtccccaacaccgccagacgtccccaacaccgccagcgcccaccctggctcaccgtgcggatctgcctccgcagaaggtaaatgaagaagctccagagcttggcggcgaaggccacgaacgtgcgcagccccagcagacactgcgtccgcatcatcccgatgaccccggcaccgccggccccggggcccccgcggcccagctccgccagccccccgggggcagccccccgccgccgggagggggaacgggggccccgagtggcaggagaggctgcagagaggggcacggagcgggcggctcagaaagccacccctggcgagggtaaagcccagcggaacggggagctgggggacaggcgtgggcagcccgcgggggcccacatgggctgggagtggcaccgacggcttcggggaggttgcgggccgagacaggtagggctaggatggggtcctccgagacctggagggaaggggaaggataattgggggagggggcagtgggggagggggctagggaaaagggaggaagggaaaagggaaggggagggggggaaagcagagagtggcccgctgcgcaggcgcgctagggggctgctcgcaggaacggggagggcgggggcagcggcgcgcaaagggccgcggcagcggagaacgggcctgcagagcgaaggagcagggaaggagggggagggggagccggagggcgcagagcgctgggccggagcggcctccccctccccgagctcgggggtcctttagccgctggggaccggggctgcagcctctgcagctgggtttcccactctgacaggcgccattttaccgtccaaaggactccctcttcctgtctttccccctcctcttcccctttgacactacttccggtggtgacgtgtattcgcttcaccgggactaagttcctcctgcgcggtctatggcgggtaggtataaggaaagccaaaagcactccaagcgaggctgcagtattgcgcacgcgcagaaggtggccgcggggcggggcctgaggcgaagcaggccccgcctcaaactgcgtgggcggggagagtgacgtcacttggcccgcgcttagggccctcgcggggggcttgtgggtcctcctccccctcccactgacaactgccccaactgctcttcccgccccggtcacagtgaaaatgtagacggggtcgttgtccgtacgactgtgcgccagggctcggggaggggcgccctccgcgtgagcgcccccctgggaatattgaacataatcacctctcattccagactatgttaggtcttaatggtgggaggacgcccgagtgctcggcccgtttcaccccgaggaggaaggacactgggtcatgacgccatcagagggcgccagagcagggaccggacgcgagttggagatgttggactcgctgttggccttgggcggcctggtgctgcttcggggtgagagccagaggcacggtggcggggcggggggtgcggttcgggcctggctgaggggacggaagtgggcaggaagggccaggggtcacaggctaggtgtggaaatcgcgacgggttcgcgaaggcggtaatcccagcgctctcataccctttatccgtccctcgctctgcagattccgtggagtgggaggggcgcagtctcttgaaggcgcttgtcaagaaatctgcactgtggtgagtatcccacagtgtctccccggcctaccctggatagggcacctgtgcccactctttgacaatcccttctcatctctgccttagtggggagcaagtgcatatcctgggctgtgaagtgagcgaggaagagtttcgtgaaggttttgactctgatatcaacaatcggtaagtaccagttggaagagatttgattaaatttgagacctataatgctaaggaaatttctttacaacaagcgcagaacctggtatgtagtagcagttccttaaatattcattgaagaattggatatggatctttcaggaggcaagaattaataagaggagtgatgagtatttggggagtccaaagcaaagatcatagaagtcgagagagaaatagcctggaaatagggagaacatgtgggaagggtattgcagtaatccgttaatccggcttcactctttaaggtacatatgtaccgagcaccaactatcaaccaggtgctgtgcaagatactggagacggcagtgagtgagacctgttcctgacctaatgaattttagggaataatggtaggaagtgatagaggcctggtttaaggcagtggcagtagagatggaaagtttagaacacatgtaaaggactttagtgggtagaatttccaggatttattgactaatatgggggagaagaaagtattgagataaggaagttcctaaacccagcggcatgcctgatcaggagacattaagaaccattagtaggatgctttctacttcctagtcccggcaactcagtggatgataatagtagtttacatcttatctgttgagcctccaattttgcatcagccattgttgtgatagaggcggtggtgtatgttcagatggcattccatggctgggcgcggtggctcacgcctgtaatcccagcactttgggaggctgaggcgggtggatcacctgaggtctggagttcgagaccagcctgaccaacatggagaaaccccatctctactaaaaatacaaaaaattacctgggcatggtggcacatgcctgtaattccagctactcaggaggctgaggcaggagaatcgcttgaacccaggaggcagaggttgcagtgagcggagatcacgccattgcactccagcctgggcaacgagcgaaactctgtctcaaaaaaaaaaaaaaaagcgggcactccacaagagaagatagaaaagagatatctgggaaaaaaagttctgctacctatgccagtctccctttcctgagctgttttttctgtagttgttacttcttgacttaattcttgactttctttaagctgttctacaggcaggaccaaatctcacgtcctctgctttctcttttttcacccagggtgataatctttaggtgccacacacaggaaatatttgataatggtgataactaacatttatcaggcatatactatgtgtcaagcactgtgctgaatgcttagaggttggcatctcatttcaccaatgaggcaactcttagaaataatgtatcagttagctgaccttgggcaagtagcaaagccaagcttggagatcaggctgtcagacaccaaagtctgtgctctcaatcactgtatgctctctctcagtaattatctttcactaatatttaggatattcataaaaattgagaaaacagccataaagatcagaggatgaactttgtgatcctctcgggggaaggggcaatattatattgtgtcttattttccctttgcaggctggtttaccatgacttcttcagagaccctctcaactggtcaaaaactgaggaggcctttcctggggggccgctgggagccttgagagccatgtgcaagaggacagatcctgttcctgtcaccattgctctcgattcactcagctggctgctacttcgccttccctgcaccacactctgccaggtcctgcatgctgtgagccatcaggactcttgtcctggtgagacccctccttcattgtttcccctcatacatctccctctgccaaggagtgtgccccttttcctttctaccctagaataaacatctgggttctccagtcagaccttttttcatttttttgacttttttgtctgtttttttttttttttacttctccttaatgccatctaccatttgcttttttttctccaagttatttttttactcatttgtttcactcattcattcatttaacaaatcaatagtaaatatatacaatgtgtcaggtacaattctagataatggcaaaatacagactgactgtagctgggtccttgccttccaggagctcgaagtcccataaaagatggagataagtaaacaggcagttacaagatggtctgataaaggccatgatgatacaggcatgcacagggcaccttaaagaagggcactcttggccgggcgcggtggctcactcctgtaatcctagcactttgggaggccgaggtgggtagatcacaaggtcaggagatcgagaccatcctggctaacatggtgaaaccccgtctctactaaaaatacaaaaaaaaattagccgggcttggtggcgggcacctctagtcccagctacccgggaggctgaggcaggagaatggcgtgaacccgggaggtggagcttgcagtgagctgagatgggccactgcactccagcctgggcgacagagcaagactccatctcaaaaaaaaaaaaaggcactctcttgaagagcaagaggtcatccaggcaaatttggccgggcaggggcactgagactagccttgaagtgcactgtgggtactcgaatggacttaggagtcagacgcccagctttgtattaaggtgcttgatctctcattgcttcactttcccctgtatatgggggaaggtacaagggaagtattaggatgaaccactatattgccatttcttaggttaaaagttgttaaatattgtctgggcgcagtggctcatgcctgtaatcccagcacttggggaggccaaggcgggcggatcacctggagttggagaccagcctggccaacatggtgaaaccctgtctctactaaaaatacaaaaaattagctgggtgtggtggtgcacgcctgtaatcccagctactcgggaggctgaggcaggagaatcacttgaacccaggaggcagaggttgcagtgagctgagatcacgccaccgtactgcagcctgggtgacagagaaagacgtcatctcaaaaaaataaaaacagtccgggcgcagaggctcatgcctgtaatcccagcattttgggaggccaagacaggtagatcacgaggtcaggagttcaagaccagcctggccaagatgctgaaaccccgtctctaccaaatacaaaaattagccaggcgtggtggcacgcgcctgtagtcccagctactcaggagactgaggcagtattgttgagcccgtagcaggggttgcagtaagccaagattgcgccactgcactctagcctgggcgacagagcaagactccatctcgaaaaagaaaagaaaaaaaaattgttaaatgtcagtgatttcatacagtttgacctaaaaacgctgacctttgtaaggattcaaacattgtgttaaagcgtttagcatagtacctgacactctctaaatgctcccaaaaagggaggcagagaattgaaggcactgactgagatcttgggaagttccagaaactacaagtacttccgtgtgtaagagatgaggctggaaagtaagtggacaccacctgctggaagcgttcgttccatcctgaaggcaggagctgctgaagaatagaagttagagcggtgccttgatcagctttacattgggatgatagaggagattaaggtgtgggctggaggaggctcagagcacggtagtgagattggccaagggacgtcaggattttggcagcactgtgatggaattgtgaggctctctcttcttcactgttagctcccaggccaccaacctgaatgctccctactatcctacatttcttgtcctcctctaggtgacagctcctcagtggggaaagtgagtgtgctgggcttgctacatgaagagcttcatggaccaggccctgtgggagctctcagcagccttgctcagactgaggtgaccctgggcggtaccatgggccaggcctcggcccacatcctgtgtcggaggccccgacagcgcccaactgaccaggtcagaagaaccaacagagaaggactggaaacgggggacagagaaaggggtggcacgatgggaagaacaatgaaaatgctgatgtttcaaggagactttaaaaacaaacttttttagagatggggtttcactgtgttggtcagggtggtctcaaacttctgggctcaagtgatccttccacctcagcctcccaaagtgctaggattacagacgtgagccactgtgcccagccctcagtgagacctttttttaaaaaaagctgatttaggtatttctctgttttctatcactcacttcatttaatcctctcagctatggttaaggtagattgttttattatcaccatttttcaggctggaaagccagtccagggagggttttattcccttggagtttttttttttttttttattggacaaggtctcactgttgcccaggctggagtgctgtggtgcaatcataacttacggcagctttgacctcccatgttcaagtgatcctcctgcctcagcctctggtgtagctggaggtgggagcacaggcatgtagcaccacatccagccagctttttagttttttatacagatgagatctcaccctgttgcccaggctggtcttgaataactaggctcaagccatcctctggccttggtctcccaaagtgctgggattacaggtgtgatccactgcacccggcccaaggaggtttaaatttaagtcacttaccaaggttataaagtgtaagtggggcccaggcgaggtggctcaggcccataatcccagcactttggggggccgaggtgggcagattgtgaggtcaggagttcgagaccggcctggctaacatggtgaaatctcatctctactaaaaatacaaaaattagctgggcatagtggtgggtgcctgtagtcccagctattcgggaggctgaggtgggagaatcacttgaacctgggaggcggaggttgaggtgagccgagatcatgccactacactccagcctgggcaacagagtgagactccgtctcaaaaaaggagtaagtgggctgctctgcctaaggagtcgccatccttttattcctttacttccttaatcaacttgctttcacttttgaaaataaaatagaggctgggcgcagtggcttacacctgtaatcccagcattttgggaggccgaagtgggcagatcacctgaggttagtggtttgagaccagcctggccaatatagcaaaaccccatctctactaaaaagacaaaaattagctgggtgtggtagcacgtgcctgtaatcccagctactcgggaggctgaggcaggagaatcacttgaacctgggaggcggaggttgcagtgagctaagatcacgccactgtactccagcctgggcaacaaagccagaccctgtctcaaaaaaaaaaaaaaaagttgagggcaggagctgaaagcagtcagttaaataggtgattgggggctgaggatgtgaggtcctggagtctgtctagtttcttcagtaagatgaaaaaaactcttttcttttttctctccagactcagtggttctccatccttccggacttcagcctggatctccaagaggggccctctgtagagtcccagccctactccgatcctcatatacccccggtatctaagaatgccaaggccagaacaaggaaatgtagtttagtatctggtcacgggagagaaaataaaagctgcagaggttgggggtggggtcagggattctagggatggggcagagtggcagcatcctttgtacctacaggtggatcccacaactcatttgacctttaaccttcacctgtccaagaaagagagagaagccagagatagcctgatcctgcccttccagttcagttctgaaaagtaaggttgggacctgggtacgtggatccctgagtagatcccagcatctgggccatggagaggttggggcaacaggttattgattaacctgactttatagggactgaagtccacctccagagacaagtccaagttcttgatccacccattccccctataatggcagaggacctttatgtctcttttctctcccttatacccttgggtcacagctccagttgtccccagagcaccctgggcctgggctgagccagaccagacccttgggaggtggccctatccctaggcagtggtgctaggaggacagaaggctatatgggcgtggcagaggctggttaacaagggcttagtacacgcttgctgttctgtgcccagtatgtgggcggatgacgcaagactacaagatccttgccctcaagctgctaggaacttacggttttattaggagagcagtacaagggtatctatcccagtaccaaatggtgcttcagctctaacatggaggtcagagaaagggacttggaccaataaaatgacatggaggcctaacaggttgcctgaatgagagtcacagtcacctggaagaaagtatccagacccaacctgttagctaccctcaccagcaccaaatcttcccttctcagacagcaggctctcctgcggcctaggccagggcaggctaccagccacatcttctatgagccagatgcttatgatgacctggaccaagaagacccagatgacgacctggatatttgactggccagatttgattagattgtaattggagggggcgcgggaagactttgggcccagaaccatctttctattgtttgtgttagccttaccctgtccctgccccaccttggttccccttgtctatggagccccgccttgtgagccaggaagcagcgtctcatcaggacagaaggtaggatgaagacatggggtaatgtgagagagtagaacacccccgtacctaataaaaatctttatttttttattaaaaaagaagtactttggtagctatttaaataagaggggggtgggaatgaatgtcgagatacgagcacctgcatcttttagtcaattgtcagtggagtcagtggggtgctaagtgttctgaactgaagtaggtgcactaaggttccaagctccctgcaaggatctggacgggaggaaagcagaggccctgaagggaaaaaagcctgcttcccaatacttattttttattactgtacaaaaagcacactctccctctttttgtctctcccaccaacggcacccccccacccccaacccaagaggactatacatggagtgcagggacagagtgaccaggaggcctttgtccggcaccctgcccacaggctgagctcagccccaggccctttcaggcatctagacactcccatagcctgtcaggctggggcaaggagatcccaggtcacacatactccttggaagagttggacttagggtaagagcggggtacacggtacccagccttgctctcattcccaggacaggaacaggagagcagtgcacctcccaggatgactagggcagaccctgcccagccaataaagatggcagggccaaactcatacctgtgaagagaagggggtggttagaaaccctggcgtgcctctgccctcctccctattccaggaccccagacctgtccccttaggaggcagggttcccagacttacttaatgttggtagggatcaaagggttataaaagtctgtgacaatctgatggccataccaggagcaagctaccaaggcggcaagacctggagacagaatgagggtttcagtatagtgaggccccaaatgggcgccttgcccagccttgctcctcccagatgggagaacccgggggctcacctgccacgatgaaaattatgcctccacccatggctatacgggccttcttcactttgtcgtctcccccacagcgcgtgcacttcatgcccatcgtggccacaaacatggccaggaagcccagcaccagggagaccaccattagggctcgagtggcctgcaaggccgctgcgggcgaggggaaagggcgccgtcattgctggaaatgcaggcggctccagccttcgtgccgccggccgcgcccactaaccgctggacctcttctgtccggcgccgtgttctgccgagggccaggggcgcccaggtgtccaagacctgggccaagcgggcaggtccccgcccctcccgacagcgcggccttcctgctcccgccccgccctctccgctcaaggatccgcccggggcgccggggtttcggtgaaactgccctggatagggggaagggtgaaagggtgcagcgaagagaagccgagacggtggtccgaagccccgcgcggcgcacatgccagccggcgtccctgctctgagcccgctatcgaggccaccgggtttgtggcttcggctaatcggccgataagattagaggcagcaggcggcggcccactctgaccagccgcaccgcccttcggccctcggcgcgccccgtgccccgcgccccggggccgtttctgtctgagaaaaggacgggagatgacggaggccatggcctgcccgggaatggaggaggggatggccccggcctaagcaccgctgctccgagccggggacgaggctgggttgggggaggaagaggaacgtgggcgaccgaggtgcgcgcccacgtgcagccgccggaaccccggcccgctcccgcccagccccgccgcccccagccgaccacttcctcgccctgcagctccccggcaacccagggcccccagccgtggggcctcggctctcccacgcgcgccaccccgccacctcggtcaagggcgcgtccgccccgtcggtcccgcggccttaccggacagggcgagcaccgagtcgtacattttgcagctcatcatccccgtgctctgcgtgacgcagtccatccacagccccttgtacatggcctgggccgtgatgatgttgtcacccgcataggagctcatctgccactgcgggatggcggtgcaggccaccagacccacccagcccagcagggccatggagaagcccagcaactgcaggcccgaattggccatttccgccctcagaaaacactgggggcgccgggcggggagaccctacagtaaaacaaacgacacttggggggcagccccacaaaagaaaacttgaggtggagttttccggtcacccaaagagacaaaaagggtttgggccaggtgaatgcaaatcttgtcaccaaactacacacaaatcgacccctccagtgaagcgatggcctcgcggcacagggagtaggatacgccgggagggtggttccagacaaaattggtggtccccgaaggccaggcggttccctccgggcgctctcggcgaccctaggcaaacaaaaggtggaggggccgtctgggcgcgtttctgagcgccggcaagtcccaaagtatcctgggctgtaggtccgaggctgcggtgcgcagcagaggtggctcggaggtgagccagcaggtgcgggcggacaggtggggcgcacctgagtatatgtagggcgtcgggggcgcggcccgcgcgccccgggagcgcgggagggggaggcgggaccggaggggcggccgaggatgacctgacgtcaccgaagggacactcacctgaaccggaagtcgtggcccccacccctccttgcccaggtgaggaggaagaaacctgagcaccagggtcacgccccttcgcttgcccggttttgaccgccgctggggaggaggcggtggctccccaggagtcccaagctccgagtcagcccctccggactggatttccctcgaacaccgggaagccccttcctttcttcccaacaggtgcgcctgggacgctgcggggcgcccctgacaagcctcggcgccgccctttccccgccgggttctgtccaaagtgctctctcctcggccctgctttcgcccccacccgctgctctccttttttttcctgtctcctaccctggtcgatcccaccttcgggggccctggctcgatccctgagagtcgcccccttcagcaccctcttcagtgtcccggttctctggctctgctacagacacccggcttagcgtggctccccaacagccccaccttcctgtgcccccattccaacccaacatgacttacagcctgaaccctttgcactcaacctccccacctaccactgtcccctccggcatcaaggctcctaactggaggaagaaaccactgggacctaaagccggccgagggtggggagcagggtgagggctaggtcagagtcttggccacacccatcgttcccctcccttagagtcttttcagacctatcctccacctttcccacccctcccccacactcgcccgtttctctttccctcccgggcctgggcttggactgccaattgctgtgcactctgtcacgcctcactgttccgtcctccctataatctggctctctaaggtggtcgtccatggtccctcaccctgcagtcctgctatctctccccaaagcattgctccctccttcctcccggcaccccttccagccttttgctccttcctccttcatctttggtcatctccccttcctgcctttcctgctttggagcttcctgtttcactccttgtcttttttttgttgttgtttgagaggaggaagtctgtgttacccaggctggagtgcagaggtgcaatctcggctcactgcagcctcgcctcctgggctcaagcgatcaccccgcctcagcgtccccagtagctgggaccgcgggtgcacaccaccacgcccagctaaagtttttgtatttttggtagagaagggttttcaccatgttgctcaggctggtcttgaacacttgaactgaagcaatccccctgcccccacctcctaaagtgcaggattacaggcgtgagccaccgcacccagcccactccttgtcttttcgtttacctttgcgccttgtctccagtctccttggaacccagcatcagcaattaatctttctttcctcttcttaggtgcacactgcactttccccacccaccctgcccagtttcctcccaatcttcctactaccctccaacctcctcatacttctcagattctcacataccctgcttattctggctctctctcatttcattttcctctctccattttttacctcaactctctcacgttttttatctttgttttgccctctcaaacatttctctgtctttccttcgtttattcgctaaacatattaaagtcccccttatgctaagctaattgacctgcttttgtataaaatgaagactttcatgaactctttttttttttttttgaaacagagtttttgctcttgtcgcccagactggagtgcaatggcatgatctcggctcactacaacctccacctcctgggttcaagtgattctcctgcctcagcctcccaagtagctgggagtataggtgcccaccaccacgcccagctaatttttgtatttttagtagagacggggtttcaccgtgttagccaggcagatctcgaattcctgacctcaggtgatcccaacccacctcgacctcccaaagtgctgggattacaggcgtgagtcactgctcccagccatgaactgtttgttattcgtttttattgttgtacttttggattaatggtacttttctggattaatgtactcttagaggccgggtctcactctgtcgcccaggctagagtgcagtggtacaattatagctcactgcagccttgaactcctgggctcaaagcatgcccccccaccccccaacaaatagctgcaattacagccacgtgtcatcattgttctggctttgtttgttttttgaaacagagtctcgctctgtcacccaagctggagtgcagtggcacgatctcggctcactgcaacctctgcctcccgggttcaagcaattctcctgcctcaccctcccgagtagctgggattataagcgcgcaccaccacgcccagctaattttttgtatttttagtagaaacgaggtttcaccatgttggccaggctgggctcaaattcctgacctcaagtgatctccctgcctcagcctcccaaagtggtgggattacaggagtgagctaccgcaactgactttccttttttttttttttttttttttttttttttttttttgagacggagtctttctctgtcgcccaggctggagtgcaatggcacgatctcagctcactgcaacctccgcctcccgggttcaggccattctcctgcctcagcctcctgagtagctgagactacaggcacccgccaccacgcccggctaatttttttgtatttttttagtagaggcggggtttcaccgtgttagccaggatggtctcgatctcctgaccttgtgatccgcccgccttggccttccaaagtgctgagattacaggcgtgagccactgcgcccaggctggagtgcaatggcacaatctcagctcactgcaacctctgcctcccaagttcaagcaattctcctacctcaacctcccaagtagctgggattacaggcatgtaccacgacacccggctaactttttgtatttagttgagatggggtttcaccatgttggtcaggtcggtctcgaactcctgacctcaggtgatccacctgcttcggcctcccaaagtgctgggattaccggtgtgagccactgcgcctggccccgacctttttttttttttttttttttccgatggtgagattttctttttttctttttaattttattttattttgagacgtaatcttgctctattgcctaggctggagtgcagtggtgcgatctcggctcactgcaacctccgcctcccgggttcaagcaattctcctgcctcggtctcttaaatagctgggattacaggcgcgcaccaccacacccagctaatttttgtatttttagtagagatggggtttcaccatgttggtcagactggtctcaaactcctgacatcgggatccgcccgcctcggcctcccaaagtgctgggattacaggcctgagccaccacccccggcctttttttttattatgttaaaagactagtcagatgcagtagtgagaaagcagtgagagtggaaaaagaagttccgtctgtaactgactgtgaacaatcaattgaaataattcactaccttcagaccagctgagattttcttgaaaattttccttttagctctaaaagaaaatatttgtcatcacttaactatatccagcttctctccaaactcactgccgccacgccacaccagcccaagactggacacagcaactgcctccaaaccaatctcccttccacactggtcattttaaactctattctctggagtgaccacttcttactcactcagagctttgtcatttcctgtttaaaatctttcagttggccgggtgcggtggctcacgcctgtaatcccagcactttgggaggctgaggcgggcggatcacgaggtcaggagatcgagaccatggtgaaaccccgtctctactaaaaatacaaaaaaaaaaaaaaaaaattagccgggtgtggtggtgggcacctgtagtcccagcttctcgtgaggctgaggcaggagaatggcgtgaacctgggaggcggagcttgcagtgagctgagatcgcgccactgcactccagcctgggcgacagagcaagacactgtctcaaaaaaaaaaaaaagaaataaaataaaataaaatctttcagtgacactcgtgttcttcccagtaagtgtcacaccatggctgacctgactgcctcagccacactggccttctctgttcctgcccactgaattgcctttgtacagtctgttctctgggtctggaagctcttctccatccactcccacccaccttcctctatccagctaaccaactaatccttcagctatccctcaaatagcacttcttttagaaagcctggcctgaccaccccaccccaaactgagtcagatcatctgcatagtgctctcacggctaccagtactttgctttcaaagctcttatcacagtttgaaaatactgtatttactttatgtacttatttattcaatgtcaatatccccactatactgtatgctccaagagggtagagatgtgtctggattttatcaccaataaatatttgaggaatgaatgaataaattgcaaataaacaatattttcattcactgttcaacaaatattttcttttttcttttttcttttttttttttgagacagagtcttgctctgtcacccaggctggaaggcagtggcacgatcttggctcatcacaacctctgcctctcaggttcaagcgattcttgtgcctcagcttcccaagtagctagggttacaggcacggaccaccatgcccagctaattttttaaatatttttggtagagatggggtttcaccatgttggccaggctagtctcgaactcctgacctcaggtgatccgcccaccttggcctcccaaaattctaggattacaggtgcgagccaccacacccagccctcaacaaatattttctaagtgtctataatgtgccagacatggccaggcacagtggttatgtctgtagtcccagctactcaggaagctgaggtgagaagatcacttaagcccataagttcgaggctgcagtgagctatgatcatgccactgcactccagtctgggcaacagagggagatcctgtctcttaaaaaaaaaaaatggtgcggccaggtgtggtggcttatgcctgtaatcgcagccctttgggaggcagaggcaggaggatcacgaggtcaggagttcgagaccagtctagccaacatggtgaaaccccatctctactagaaatacaaaaaattagctgggtgtggtggcaggggcctgtaatcccagctactcgggaggctgaagcaggagaatcgctttaacctgggaggcagaggttgcagtgagccgagactgcatcactgtacttcagcctgggcaacagagcaagactctgtctcaaaaaaaaaaaagggggggagaccaagcatgttggctcatgcctgtaatcccagcactttgggaggctgaggcggggggatcacgaggtcaggagtttgagaccagcctggccaacatggtgaaaccccgtctctaccaaaggtacaaaaaattagccgggcgtggtggcacgcgcctgtagtcccagcaactctggagactgaggcaagagaatcccttgaacccgggaggcggaggttgtgaggttgcagtgagccaagatcgcgccattgcactccagcctgggcaacaggctgtctcaataatttaaaaaaaaaaaaaaagaaaggctgggtgcagtggctcacacctgtaattccagcactttgggaggccgaggtgggtggatcgcctgaggtcaggagttcgagaccagcctggccaacatggtgaaaccccgtctctacttaaaatacaaaaattagctgggtgtggtggcaggtgcctgtaatcccagctactcgggaggctgaagcaggagaattgcttgaatccaggaggcggaggttgcaatgagccgagatcgcgtcattgcactccagcctgagggacaagagtgagacttcgtctgaaaaaaaaaaaaaagaccaggcactatagttgaccctggagatacagcaggaagcaaactggataaggatactgaactcatgctacttattttctagaaggaagaagcagacaataaagacataaacaaaacggtgcatgttttgaaagcaataaagcagtgtaatctgatgaggtcgaatctactctaggatgaggttagagagaactttttgaggaaatgactgctaaataatatgccagtggccaggcacaatggctcatgcttgtaatcccagcactttgggaggctgaggcaggtgggtcacccgaggtcaggagttcaagaccagcctggccaacatggtgaaaacccgtctctactaaaaatatttttaaaaattagccgagcatgatggtgtgtgcctgtaatcccagctactcgggaggctgagacaggagaatcgcttgaaactgggaggcagaggttgcagtgtgccaagatcatgccactgcactccagcctgggcaacaagagtaaaactccatctcaaacaaacaaaaaataataatagtaagccacgagggaaccatattataggcagaaggaacagcaagggcaaagggcaaaggcctgctgttgattgcccctttgagactcacagtaattaatttaaagcagaatttctcaaccttgacactgttgacattttctcccctgctatctcttgggctagataattttttgttgtcccatgcattataggatatttaggagcatctctgacttctatcaattagatgtaccctcccctgtacctaagtgtgacaaaaaatgtctccagacgttgccaaatgtcccagggaggagaggagtaaaatgggtcccagtaaagcgtgactggtgagcatcatcatggatttttttcctctaatagccttgaagtaactagttggataaaaggatccaagtaggggccgggcgtggtggttcacacctataatcccagcactttgggaggctgaggtgggcggatcacctgaggtcaggaattcgagaccagcctgaccaacatggagaaacccggtctgtactaaaaatacaaaactaatcaggtgtggtggcatgtgcctgtaatcccagctactcgggaggctgaagcaggagaatcacttgaacctaggaggtggaggttgcagtgagccgaggtcgcaccattgtactgtagcctgggcaacaagactgaaactccttcaaaaaaagagaaaaaatgggatccaagtacatgaatagttgaaattaactagggttgggtgttactaaaaagaggaagaaggaattttataatattttcacgagagtgattgtgttagattatagatataaattgggtaagagggagagaaaacacaaaagagttggtggatagtgaaaaactggtaggatcaaaagtttagaggtccccatgaggtgaaagaagtgaggatacatgagtctggacatggtggctcatgtctgtaatcccaacactttgggaggctgaggtaagtggatcacttgagctcaggagttggagaccagcctgggcaatatggcaaaacctcacctctacaaaaaaaatacaacagcaaaaagttaggcaggcatggtggctggcacctgtagtcctagctactcgctcgagaggctgcggtgggaggattgcttaagcctggaaggtcgaggctacagtgagccatgatcattccactgcactccagcctgggcaacagagggagaccctgtctcaagaaaaaaagaggccgagtgcggtgggtcaagcctgtaatcccagcactttgggaggccgaggcggacggatcacgaggtcaggagatcgagaccatcctggctaacacggtgaaaccctgtctctactaaaaacacaaaaattagccaggcatggtgacacactcctgtagtcccagctactcaggaggctgaggcaggagaatggcgtgaacccgggaggcggagcttgcagtgagccgagattgcgccactgggcaacagagtgaaactctgtctcaataaataaataaataaataaaatttttaaaaaggaaaaaaaaaagtgaggatatgtgagtaaatgaactagaaggctagaggtgattatgaaacattcctggtttgaattcaaaaaattggaagaaggccgggcacagtggctcacgcctataatcttagcacattgggaggttgaagcaagcagatcacttgaggccaagcagattgcttgaggcttgagaccagcctgacccgttaacaaggcaaaaccccgtctctcctaaaaatacaaaaattggccaggcctcggaggcctgcagagagccgagatcacgccactgcactccagcttgggtgacagagcaagactcagtctcaaaaaaaaaaaaaaaaaaaaatagccaggcataatcccagcttcttgggaggttgagccatgagaactgcttgaacccaggaagcagaaattgcaatgagccgaggtcacaccactgcactcctgcctgggcaatacagcaagactctgtctcaaaaaaaaaaaattgttgctaggcatggcagctcatgcctgtaatcccagccttttgggaggccaaggccaacagatagcttgaggtcaggaattcgagaccagcctgggcaacatggtgaaaccccatctctgccaaaaatacaaaaattagccaggcatggtggtggatgcctgtaatctccgctactcaggaggctgagaatcgcttgaacccgggaggcagaggttgcaatgagccgagacggcgccactgcactccagcctgggcaacagagcgagactccatttcaaaaaaaaaaaaaaagttggaagagtttgtttttggagatgacaaaacctagggtagaggtctgaggatgggctgaagaggaaaatcactggagaagagactgaggagtggagaggccacaatggattgccctgatggattatgaagttatcaacgatgatgttaggaaaaaataggtgaaaagaggaagaagatgagccaggtgctaacattatcagtgaatgtgggtgaacaaccgggtttgaagacccttgcaacaagtagaggcagcagatcatatagtttgagacgttaatttcaaaaagcagaggattttgaaagatgaagaaagaataagggtctaaggccaggcatggtggctcatgcctataatcccagcactttgggaggccgaggggggcagatcacgagttcaggagttcgagagcagcctgacctacatggtgaaaccccatctctactaaaaatacaaaaattagccgggcgtggtcatgcacgcctgtaatcccagctactcaggaggctgaggcaggaaaatcgtttgaacccgggaggcggaggttgcagcgagccaagatcgcgccactgcactccagccagggtaacagagtgagactccatctcaagaaaaaaaaaaaaaaaggccgggcacggtggctcacgcctgtaatccctcccagcactttgagaggctgaggcgggtggatcatgaggtcaggagatcgagaccgtcctggctaacatggtgaaaccccgtttctactaaaatacaaaaaaaattagccaggcgtcgtggcaggcgcctgtagtcccagctactcaggaggctgaggcaggagaatggcatgagcccgggaggaggaggttgcagtgagcagagattgcgccactgcactccagcctgggcgacagagcaggctgtctcaaacaaaaaaaaaaaaaaagagtctagacgcagcactagggagcaatccacccaactctactctgcagtatgcaaagaccgatgaacaagcctctgtaaagagggctgccagggaagtgtgccctccagacgccaggtttcagtaaggtctaggaaagggaggttcagagaagaggatgggcttataagaatgatgacagacattgagtccagaggtaaccgtggaaaaatttgaaaggtcaagtctggttggaagattgggtgatattaggggatgtacactacagtatggggtggtggatgatgacattatgagttaatcaacctcgtatgaaaacccaaccaacttgtttgtttctacaggaaattgttctgagttctaaaaactgatacataaattaactttggaaacttgcagcattatttataaagtaattggttactgattatttcaaggcaaatgatattccaggttctaattctgcttccttcaggacttcattcttgggcttcgactatctcatctttaaaataggagtgataatgtttttgcctacttgggaaacaagaggctgggctaagtggtctactatggttcattctggagtagatatttgagatacagatttggaaaagaagtgaaaaagtgaccaactcatttatgaggctagggtaatcttgcctctgaaatcagttagtaataatataagaaaagaattctaggcccatttaatctatgaatatagacacagaagtctttaataaaatattacttaactaggctggaagcggtggcttacgcctgtaatcccagcactttgggaggctgagatgggcagaacacatgaggccaggagttcaaaaccagcctgaccaacatggtgaaaccccgtctctactaaaaatacaaaaaaattctttgggaggctgaggtgggtggatcacgaggtcaggagatcgagaccatcctggctaacatggtgaaaccccgtctctactaaaaatacaaaaaattagccgggcgcggtggcaggcacctgtagtcccagctacttgggaggctgaggcaggagaatggcacgaacccgggaggcggagcttgcagtgagccgagatcatgccacggcactccagcctgggtgacagagcgagaatctgtctcaaaaaaaaaaaaaaatacaaaaaaattagccgggtgtggtgacgcacgcctgtagtcccagctactcaggaggctgaggcgggagaatcgcttgaacctaggaggcagaggttgcaatgaggctagatcatgccactgcactccagcctgggtaacacagcaagattctgtctcaaaaaaaagaaaaaattacaaaatccatcaatgtggtttatcacaataatagactaaaggaaaaaaatcagcaggatgcggtggctcttgcctgtaatcccagcattttgggaggccgaggtgggtgaatcacgaggtgaggagatcgagactatcctggttaacacagcaaaatcctgtctctactaaaaatacaaaaaattagccaggcgtgttggcacacactagtagttccagctactcgggaggctgaggcaggagaatcacttgaacccaggaggcggaggttgcagtgagccgagatcgcaccactgcactccagcctgggtgacagagcgagacttcatctcaaaaaaaaaaaaaaaaaaaaatagaggctgggcgcagtggctcacgcctgtaatcccagcactttgggaggctgaggcgggtggatcacctgaggttgcgagttcgagactagcctgaccaacatggagaaactccgtctctacttaaaatacaaaattagccgggcgtggtggtgggcacctataatcccggctactcgggaggctgaggcaggagaatcgcttgaacctgggaggcagaggttgtggtgagccgagattgcaccattgtactccagcctgggcaacaagagcaaaactccgtctcaaaaaaaaaaaaaaggaaaaaaaatcatatggctatctcaaatgagaattttaaagggcatttgatgaggttcaatacctgcttatcataaaaacctttagcaaacaaaggttagataggaaattcttatacttaatgaataatgttggactcatctcttttattcttggggaaaaaaacaaagatgtccactgttaccacacttattttacaaaatcctagaggtcttgagcaatactacaaggaaataaaagaaacaagtagtgcaaagatacgaaaggaaaaaataaaactgattatttgccgggcgcggtagctcacggctgtaatcccagcactttgggaggccgaggtgggtggatcaacaggtgaagagttcgagaccagcctggccaacatggtgaaacccatctctaccaaaaatacaaaaattagctgcatgtgctagctcacacctgtaattccagctacttgggaggctgaggcagaagaatcgcttgaatctgggaggtggaggtcacagtgagccaagatcgtgccactgcactccagcctgggcaacagagccagactccgtctcaaaacaagaaaacaaaacaaaacaaaaaccctgattatttgcaggtaatataatcatctacttagaaaaaccaataaaatcgccggtcgcagtggctcacacctgtaatcccagcactttgggaggccaaggcaggtggatcacctgaggtctggagttcgggaccaggctaaccaacgtggagaaaccccgcctctactaaaaatacaaaattagccgggaatggtggtgcatgcctgtaatcccagctactcgggaggttgagacaggagaattgcttgaggcccggaggcggaggttgcagtgagccgagatagcgccgttgcactccagcctgggtaacaatcgaaactccgtcttaaaataaacaaataaataaaataaaatcaacagaaagactagtagaacaagcaagggtattcataaaggttgttgtgtacaaaattaacctataaaacaaacaaacaaacaaaaactactagtattttactgcaccagaaattaccaatcagaaaatgttaaaaaaaaaaagaaaagaaaagaaaagaaaaaagaaaaagaaaaaaaaaggccaggcacagtggctcacgcctgtaatctcagcattctgggaggccaaggtaggtgggtacttgagcccaagggtttcaggccagcctgggcaatatagggaagccctgtctctacaaaaagatacaaaaatttgctgggcatggtggtgtgcgcctgtagtcccagctacttgagaggctgaagtgggaggatttcttgagcccaggaggctgcagtgagccataattgcaccactctactccagccaggacaacagagtggcactctgtctcaaaaaaaaaaaaaaagaagaagaagaagaagaaagaaaaagaataacaaaaataacattcaatggccaagcacggtggctcacgcttgtaatcccagcactttgggaggccgaggcaggtggatcatggggtcaggagtcagagaccagcctgtccaacatggtgaaagcccatttctgctaaaaatacaaaaaattagcagggcgtggtggcacacgcctgtagtcccagatactcaggacagtgaggcagaagaatcgcttgaacctgggaggcggaggttgcagtgagctgagatctcaccattgcactccagcctgggcaacacggtgagactatgtctcaaaaataaataaataaataaataacatgcaatttacatcagtgacaaagttataaggtatctaggaattaaccaagaattcttaaaactttagtggaaaaatgttttttaattctcataaaatacatagatgacagcctgaatatataaatcaatagtccatgctctcaaatgggatgacttaatattataatgatatcaattgtccctagaataatttataattcaatgttaccaataaaaatccaactggcagctaggtgtggtggctcatgccggtaattccagcactttgggaggccgaagcaggtggatcacctgaggtcaggagttcgagaccagcctgaccaacatggtgaaacccccatctctactaaaaatacaaaaattagcccatagtggtgtctcacgcctgtaatcccagctacttgggaggccaaggcaggagaatattttgaacccaggaggcagaggttgcagtgagctgagattgcgccattgcactccagcctggttgacaagatcgaaattccgtctcaaaaaaaaaaaaaatccaactgttgttttaggctttttttttttaacgttaaatttatgtaagcaagtttttttaaaaaacagatcttgttaagtgtatctccaaatttgtatagagcaataaaaaacaacaaatattaagtctacagtgaaaagaaagagtaatggccgggcacggtggctcacacttgtaatccagcactttggaaggctgaggcgggcggatcacttgaggacaggagttcaagaccagcctgaccaacgtggtgaaaccctgtctctactaaaaatacaaaacaattagccaggcatggtggtgggcgcctgtaatcccacctactcaggaggctgaggcaggagaatcgctcgaacccaggagacagaggttgcagcgagttgagatcgggccattgcaatccaacccgggcaacaagggcaaaactctttctcaaaaaaaaaaaaaaaaaaagaaagaaaaaaaaaagaatgagtaacaagaagtctcttgcccttctcagaaatttaaacttgctacaaagtatcataaaaatcaacttgtgcaagaacagacaaatacatcaatggaacagaatacaaattcagagacagacccttacatcatacattagaatttgatatatgataaaagtggttcactaaagagaaaagtaaattggatccctaacacctaaaacaaggatgaattctagaggaatcaagaagacttaaatgtgaaaagtaaaactataaagttactggaagaaaatgtagaagaatgcatttatggtgcagagttgggaaagaatatatacaaattatcaaaaattgcaaaccataaggggaaaaaatggtcattttcattacacttaaattaataatttctattctggccaggagcggtggctcacacatataatcctagcactttgggaggccgaggtgggtgggtcacctgaggtcaggagctccaggccagcctcaccaacatggtgaaacaccgtctctactaaaaatacaaaaattagctgcatgtggtagctcacacctgtaatcccagctactcaggaggctaaggcaagaaaatcacttgaacccggtgggcagaggttgcagtgagccgagattgcaccactgtactccagcctgggtaacagagccagactccatatgaaaaaagaaaaaaaatctatttcatgaagttcatgaaggaaaaattaatatagagatgatagaatgggagaaggtatctgcaatgcctaaatctgacaaagtaactgatctctcttttttttttttttttttttgagatgaagtttcactcttgttgcccaggctggagtgcaatagcgcgatctcaactcaccacaacttctgcctccctggttcaagtgattctcttgcctcagcctcctgagtagctgggattacaggcatgcaccgccacacccagctaattttgtatttttagtagagacagggtttctccatgttggtcaggctggtctcgaactcccgacctcaggtgtttggccggccttggcctcccaaagtggtgggattacaggcgtgagccactgtgcccagcctgatctcattgtgtttgtttgtttgtctgtttgtttgagatggaccctcactctgtcacctaggctggagtgcagtggcatgatatcggctcacctcaacctccgccacccgggtttatgccattctcctgcctcagcctcccgagtagctgggactacaggcgcccgccaccacgtctggctaattttttgtatttttagtagagacagggtttcaccgtgttagccaggatggtctcgatctcctgaccttgtgatccgtccgcgtcagtctcccaaagtgctgggattacaggcgtgagccaccacgcctggccacgagtggattttaaaaacatcgtgattactgaaaataagatcagagtgaaatatataacaagatgctatttatggaaatttaaaatgtttgggccgggcgtggtgactcacacctgtaatcccagcactttgggaggctgaggtgggcagatcacttgaggtcgggtgttgaagaccagcctggccaacatggtgaaaccgtctctacttaaaatacaaaaattagccaggcacagtggcgcaagcctgtaatcccagccactccggaggctgagacaggagaatcacttgaacctgggaagcggaggctgcaatgagtggagatcgccccactgcactccagcctgggtgacagagcgagacactgtctcataaaaagaaaaaaaaaaaaaactttgcacacaaaatgatttatattttgtaagagcacaaagaaaaaaatgaacatttaatgcactggaataattgaatgcattggaataagcatttgggtgtggtgaatcgaacgtgtagtcttagctacttgggaggctgaggtgagaggaccgcttgagcccaggaagtctaggctgcagtgatcggtgactgtgcctctcactcgagcctgagcaacagagacctcaactcaaaaccagtaaaatcgccgggcatggtggctcacgccagtaatcccagcactttgggaggccgaggcaggtggatcacctgaggtcgggaattggagacaaacctgaccaacatggtgaaatcccccatctctactaaaaatacaaaattagctgggcccggtggcgcatgcctataatctcagctactcgggaggctgaggcgggagaatggcttgaacccggaagatggaggttgcagtgagccaaggttgtgccattgcactccagcctgggtaacaagagcgaaactctgtctcaaaacaaacaaaaacaaaaataaaaatgagacatagatcagtgaagacagtgtgctaataactgtcattcgttcaatcttctgtgctggaactcagggatcaaggtccccagaagccggaaacaaagtgaacctgtggagcaggaactgggtgaggaagctttctttgaaggatgaagaggagtcctttggaattccggatttttttttttcttcttgagacggagtcactctgtcgccaggctggagtgcaagggcacgatcttggctcactacaacctccacctcctgggttcaagccattttcctgcctcagcctcccgagtagctgggattacaggtgtgcataaccacgcccggctaatttttgtatctttagcagacatggggtttctctatgttggccaggctggtttcaaactcctgacctcagtcgatccacctgccttggcctcctaaagtgctgggattacaggcatgagccaccaggccgggccggcattccagatttttcaggggattagtgcagcaaaggaatcaagaagggatgtaaaggcacagtgtgttctgggtacaataaggacttaggcattgcccagaacaggaggcgaaggagatagaaggagaggcaggagagataggtaaggccagagatcggataagagaggcaggaggttttgttcactctgaaaagggatttgaacttggcaattggggcaacagagacagtgacttcttgcttgagagatgagattggaccttcgaaaattgttctctgccctcgtcataaaggaaataagaggagcacgaagaccagtgagggtgatggtgatctggactgaagtggcagccgccacggagaatatcggatgaatgtgagagagttttggaggtcaaagcaccaatgttggaaactaactggataaacgaggagagcggcgcaggacaggaggaatcgagcctgacttctaccataggggtgactgggcgggtaattcattgaaataaggaagttaggaggaggagcaggtttggacatgctgatcactagagctgccacatccgggcggtaacgaacacctggatctgcagctccagagaagggcctgggtcagatgtcactgaagccctatggtggcggaaaggcgagaaatagtgggttgagattccaagtgcaatccactgcggctcctcgctcgccctccaggtggcagcacaaccctgcgcttccgaagcccgttttctgagccagacactctccacgctctgggtatttcggcttctctctccccacacgccgaccctaggtcgcgcactttctgcctggcagaatttggccgaggatccaaacccggagcagcctccagagagcgtgtcgttcacgcggccagcatatgctcagagacctcagaggctcagagacctcagggctggtggtgtggtcggttgtgaccacttgtccctcggaccggctccaggaaccaacctggggaatgtgtgtaggggaagggcgggatagacagtgcccggagcagggaggcgctgaaagacaggaccaagcagcccggccaccagacccgttgtgggaacggaatttcctggcccccagggccacactcgcgtgggaagcatgtcgcggactctttaaggcgtcatctccctgtctctccgcccccgcctgggacaggccgggacgcccgggacctgacatttggaggctcccaacgtgggagctaaaaatagcagccccgggttactttggggcattgctcctctcccaacccgcgcgccggctcgcgagccgtctcaggccgctggagtttccccggggcaagtacacctggcccgtcctctcctctcagaccccactgtccagacccgcagagtttaagatgcttctgcagcccgggatcctagctggtgggcggagtcctaacacgtgggtgggcggggccttttgttccagggactcttttctcaaaacttcccagtcggaggctggcgggaacccgagaggcgtgtctcgccagccacgcggaggggcgtggcctcattggcccgccccaccaactccagccaaactctaaaccccaggcggagggggcgtggccttctggggtgtgcgggctcctggccaatgggtgctgtgaagggcgtggcccgcgggggcaggagcgaggtggcgggggcttctcgcgtcttttcccccagccccgctccaccagatccgcgggagccccactgctctccgggtccttggcttgtggctgtgggtcccatcgggcccgccctcgcacgtcactccgggacccccgcggcctccgcaggttctgcgctccaggccggagtcagagactccaggatcggttctttcatcttcgccgcccctgcgcgtccagctcttctaagacgagatgccgtcgggcttccaacagataggctccgaagtaggattcatcatgagggggcggggcgggggggcacgggtcccgcttttcttgggctggggtcgcggttggggtcagctgggggtggttcctgcgcaggcgcagggggtgaaggtagggggctggctatttatacccggcctggacaacccgtgactgtgagattccaatcctaccaaaaggcagagtgggtctggagggcctttcggggcacaggcagcaagtggattctgcgagccagggttcacccccttgcctagtaggcggcgcggcgctccggaatcggggacaccctgccctcgatccgactcgggaaagcagatccaggcgggtcttgccctccgggagctgtccgtccgtcttcgctcacgggcagtgtttcgaggaccggaggctctccgtgggcccccacccccactcctggccgccctccaggacgctgaactttcccttggccccatggttggtggaggggcagaggggactgtcagccccccctcctccagctcaggtttccgcttggagacagtctgtgccgccagcgagcggccaccactgccaccgcccctcacactaccttcctgccctcctcccctgggcatggctctcccaggcagaacccctggacggccctccctgcacggaggttagagggggagggcaggccacgacgtagatagagaaggccacccctagatgaccgggatgtcctttctggaacagcacttcttggtcctgttgggggcctcctggagctggctgacagaacccccagaggggagggaagaggacagtggctgatgataataatgcacgtgttaatttatgaaaccagcactgtcaaggatattgttaacatgtgatgttgattttcacaacactctcacagataggtaggcaaggcaggcaacatcacccccatctcacagaggacactcaggttcggggcagggaagtgacttggccaaggtcacacaaatctgagctcttaaggccaagcctgtctcaaggtcacagaagaattttgagacaagttctcaaacatttctctgccttatggacccaaacatccagtttctcctttatgcccaggttgcagttcagctcctgtttacattgagatctttgtgcaattcctaatatggcccagtttccctcacccaacatgttgggtggagcccagtatcttcaggctccagctgggcccgggcccctagcggaaggaaaaaaatcatggttccatgtgacatgctgtgtctttgtgtctgcctgttcaggatggggaaccccctcagcagcgagtgactgggaccctggtccttgctgtgttctctgcggtgcttggctccctgcagtttgggtacaacattggggtcatcaatgcccctcagaaggtgagggcctgcagctggcagggtgggggtacccaaacgaggaggacaggtgtctcgggggtggtggaaaggggacggtctgcaggaaatctgtcctctgctgtcccccaggtgattgaacagagctacaatgagacgtggctggggaggcaggggcctgagggacccagctccatccctccaggcaccctcaccaccctctgggccctctccgtggccatcttttccgtgggcggcatgatttcctccttcctcattggtatcatctctcagtggcttggaaggttcgcagctggagggcaggggtgggggaaacaggaagggagccactgctgggtgccctcaccctcacagcctcactctgtctgcctgccaggaaaagggccatgctggtcaacaatgtcctggcggtgctggggggcagcctcatgggcctggccaatgctgctgcctcctatgaaatgctcatccttggacgattcctcattggcgcctactcaggtactcacgggcaccacagccctgcctagcgccctgttctctttcaccatgcctgggctttcagatgggaatggacacctgccctcagccctctcttcttccctcgcccagggctgacatcagggctggtgcccatgtacgtgggggagattgctcccactcacctgcggggcgccctggggacgctcaaccaactggccattgttatcggcattctgatcgcccaggtgaccggagcaagcctcatgggtgcctgggcagtggttagagtggggctctggagaatatggtgggcttccaaggtaaggcagaagggctgagtgacctgccttctttcccaaccttctcccacaggtgctgggcttggagtccctcctgggcactgccagcctgtggccactgctcctgggcctcacagtgctacctgccctcctgcagctggtcctgctgcccttctgtcccgagagcccccgctacctctacatcatccagaatctcgaggggcctgccagaaagagtaagctctcccgctgcagcctggcccaggcccatgcctccgcctcatcttgctagcacctggcttcctctcaggtcccctcaggcctgaccttcccttctccaggtctgaagcgcctgacaggctgggccgatgtttctggagtgctggctgagctgaaggatgagaagcggaagctggagcgtgagcggccactgtccctgctccagctcctgggcagccgtacccaccggcagcccctgatcattgcggtcgtgctgcagctgagccagcagctctctggcatcaatgctgtatgtgtggagcagcctccaggcagggcacagccccgggagggtagacgagagtggggagcaaaccccctccaccaacacccagggtagggccagcctgttgtggctggagtagaggaaggggcattcctgccatcacttcttcttctcccccacctctaggttttctattattcgaccagcatcttcgagacagcaggggtaggccagcctgcctatgccaccataggagctggtgtggtcaacacagtcttcaccttggtctcggtaactgctcacctctggaatggcccgagccactggcttcacctccctgggtgtcccggaggtcctgctcttggttgccctcacccacgcggcccctcctacttcccgtgcccaaaaggctggggtcaagctccgactctccccgcaggtgttgttggtggagcgggcggggcgccggacgctccatctcctgggcctggcgggcatgtgtggctgtgccatcctgatgactgtggctctgctcctgctggtaaggcctggaggctaggaggggctagcagcccaccccatgggaatggtcctgtgagtctctgtgaccagccagggtcccttcttaacacacatgctttcaatcctggcgccagctccggaccaggactggggctgactggctccagaatctgctgggattgtggtctgctcctgagggatttgggctgcactgggaggcagctgtggcacaactctggcagccaggagggagagcccctgtcaagcctcaggaacaatcattcctaaggacccagctttagagtccagggagagctgaccgtcataagaactgagaggccataacatttcctctgccttgaacccacttgggatagccagcagaatgccagtcaagggcctgctctaacccgggacagcaggccccctacaagctgctgcggagggggttaggtttcacttctctgagttgagggcaagggaagatcagaaaggcctcaactggattctccaccctccctgtctggcccctaggagcgagttccagccatgagctacgtctccattgtggccatctttggcttcgtggcattttttgagattggccctggccccattccttggttcatcgtggccgagctcttcagccagggaccccgcccggcagccatggctgtggctggtttctccaactggacgagcaacttcatcattggcatgggtttccagtatgttgcggtaggtccccccgccccagcctcccacaccgtaggccagaggtgggcatcacacagctagcccacctgcttccccgtcagggactcctccagccacagaccatgggtctttgggtcagtttggtggaccacctgctccacagaatcaaagcaaggaagggagctgacctagattggatagtaactgaggtgtctgaaacgcaccagtggcataacttaccttactccaagaataaaatgatacactttgcattaatactacaaacagctgggactctcctctgagtgcagtaactgaggatggtgaagagggcgaaaactaagagtgtttggggttcagagaatcctcttttcagtgtaaattctcattcctgctcatttcccttgtccctggaggaggcagctgctgtctgccgtccccccagctccctatgaaggcctttagctcctggttgcctgaaactaccccttccctccccacctcactccgtcaacacctctttctccacctgtcccaggaggctatggggccctacgtcttccttctatttgcggtcctcctgctgggcttcttcatcttcaccttcttaagagtacctgaaactcgaggccggacgtttgaccagatctcagctgccttccaccggacaccctctcttttagagcaggaggtgaaacccagcacagaacttgagtatttagggccagatgagaacgactgaggggccaggcaggggtgggagagccagctctctctacccggcccagagaccccttcctttcctctgcagcactttaaccctctcttccctattatttccgggtggaaaagaatccctgcagcctggtagaattgggaagctgggggaagggtggtctgagcaccccctcattcccctcgtgtgactctcttggattatttatgtgttgtggtttggccgtggccatcagggtgggccactctcccctccctcttccttcccccatcccctttcctccccaccttccccagactcagctccagaataccttcttcgctgctagagaagggggattggagggaagacaggtctagactttctcagtgggacaaaccagagcagagagcaggacaggagacaagaaatccagtttcccaccaccttggactcctcccacaatctgggactttcactgaattcttgccacgcagactctgggcaaaggggtttttttttttttttttttttttttttttgagacagtctcgctctgtcgcccaggctcgagtgcagtggcgtgatcttgcttcactgcaagctgtctcccaggttcacgccattctcctgcctcagcctccggagtagctgggactacaggcgcatgccaccacacctggctaatttattttgtatttttagtatatacgcggtttcaccatgttagccagaatggtctcgatctcctgacctcgtgatctgcctgcctcagcctcccaaagtgctgggattacaggcgtgagccaccgcgcctggcgaagggagttctctcttgacccctgcagggaaaaggactcacctccctcactgcaggctcagccttccagggcaagagggaacaggaaagtatgtgcccatgtgtggcaagatggaaggacggcaggctcccgcctctaggcttggggctctaccccgatggtttcccaaggctgccaagaaggagccctaactttcttcctctcccttcctggaagggtgctgcatccacaggcttttgaccaactaaggcaaagaggggatttgaaaggctgcctggaaacactgggctgggaggagcctttggatatttttatatacgtttgaaaaggggattgagagaagaaaccaaaggtcggttgtactaaatgtatatatatagatacttctataaagtcactgctgaagacaagcatcctattgtggaggtacttgaggatgggctgagacagggaccataactcttcacccctcttcctccctctgtcctgcctcagctcaaggcctcagaatcttctggatgccattgctcatgcccctactcacatttctactcgttgctttattaatagtaaatgctcaataaattgtagctgccagtgccgggcattgctcttggcatttgcagaatactcactctgtgagggaggtgtcagcccatgtcacagatgggcagtgaaacccatgataggggcactcttcaccagggacacagctggagacatggcagcaaggatgccaggccctgcccacggccccacatcccctcctccccaccttcaacagtgagttactagcgattctccaaaacagaagagatggagaccaagaccacaggaaagcctgtttttgtttttactggaggctcaggtggcacatgacagatcataaaatggcttcagaggtagggggccgggggaaaacaaaaataaacttggggtgggggcaagaaaagcaaccaggaggaggtaagagctggctggttccttctcagcctgagttacgggagggagttgctgtctctgaacagtaaggatggctcccttccttcaacccttgataaggggagggaagaaaaaagaaaaagcaaaaggctgctgctttggtcctcctgagtctcaaggaaaaggtgaaaagctggtgttttgatgtcatgaattatgggaaagggggagcagggtactgggtagggtacaggtcatttggaaaaactggcagatacctgagagagaaaaggaaatggacggattgtgaacaacagcgacttgtcatcgccacccagtacctcaccttcctggccacccacccaactgcaccagccactcaccagatggcagctctgggtgtcctctgagttgagttggaatcactccaggatggtggtggtggggtccccactgttgacaggggctgaggtctaaagaacagcggtggccaattgagacttgttctttttgtttttgagacagagtctcactccaggttggatggagtacagtggcgtgatcttggctcactgcaaactccccctcccagttcaagtgattctcctgccttagcctcccaagtagctgggattacaggcatgtgctaccacgcctggctaatttttgtatctttagtagagacggggtttctccatgttggtcaggctggtcttgaactcctgaccccaactgatctgcctgcttctgcctcccaaagtgctgggattacaggcatgagacatcgcgcagggctgagacttgttcttcagggccctgaacttcaaccttctttcactttttcccttcccattaaaacctcaatcacacccctcagttcacatctacaagctggtaggatggctccaggcagcaagtgggggatgggttggggggggcatggccatcatgggcaatcatgggcttgattgcctctgtgggggcttcctggtgggaggcggcacctgccagggggggacccagcaggctgcatggaagagggtggtggcagggccagggcaggggaggggaggagccaaaggatagagtaggaaagaaaaaggagcaggtgggggagggagctggtctcagccttttctttcatcccacatctgaggtcctcacctcaggggctgcgggctgccgggggccaggggcctgctgggggccaggggcctgctgccgtctccgctggaagtaggggcggtttcgtgggcgctggggctcaggccgggaaccatcagcgggaccttggctgggcttggtctcaccatccccaccttctgtggtaggctgctggcgtggcctggggcggaaaggcctaaggcaaggaacaaggctctgaggggaccagggaatactccctccccagggctcacccagctgccccaccccacctccaggagccaggcttccagcccatgagcactgcctccccgcaaggcacctgtctcgccaggagcccaggctctgcctagagcttcacccttccatcctcctgtcccttgccccaaggatccaacactggaaggggaagaccaagccccagcaggggggtcttaccttcggtacctgggccggaatctgggcggggggactcgctcatctccctgctgttggtgcccctccaatggggctgtctctttgggttctaccctgtcagtgccctgggaacatgcaaaggccccggtgagctgtggggacagcagctgctctggagccagattatccacagctctgcccaaccctcagttcctccttctttggggacccatggtctctatcctaactcccactcctctcctgaacttggggaactggctcccatattccagcatcccctcacctctataggctgctgctggttgggaggccgggggcctcgcacaaaccgccgtcggtagaagaagggtggggggcaccatcgtcggggccgttgcccagagtcttcagcccgctcccctttactgccaggtcctgtccccgccgaggggatctctgccaccatgggtggtggggcaactgagggaggccgggggatgaatcggcgggacttacgtcggttgggggcataacggctgcccttcacgggtactcccccaggcccagttacattagtggcttctgcgccctgggaaggtggtaagggaatagtgagaacctgctccaacagccaatgtgcatttcccaacttgcttccccttctttcaggggaagacccctctccagctttcctttagctcctctaacttctttctaccctccctggagaggcagtggaatgtgcttgcacccatttgggaaggagcaacatgtccttttgaaataattgctactgcaccctcctgagtatacgactgggtggagaaaggcctggcagccagcatccacctttttactccagaggcggactcgggaagtctaggacagggccccacgtggagaacggatgtcgaagtgcttggtgaactagagaagaaacccagacactgccgaccgatgacagggacatacttaggacatcccttagccctagcattaaggaagaggacatcagggtgagagaacacagtcccattcccgcagaacgggtcagagctggccccaggagggtcttagcctgtgatgacctccaggccaccctcccgtaagcctagtcaactctataccccatagcagtccccaaaccttctctccttccacgacatcaaattccacagtctccccatctccaacgctgcgcagaaacttcctggggttgtttcttttaatagctgtctgattggggaaaaggccatgtgaaaagtgagacagcaagacaggagtctctgtcacccctgctggggccaccacccaatttcattctttcaacatttgacttggggtctagagctggagggtggagcaaggaggtggtcaaagtttagcaggggaaaagtcctgaactcagggcctcagcagattgtgcagttaccaccatccccaggatgcactccccgcacctcccctcccgccccgctttacccctcagggatttcagaaagggaggcaagaaatatgaactccaaagcaaaaggcagggacagccttcagtcgcaaagtgggtagaatgcactgtgcttcttacctcagtcccagtgagagctctttccaccaagcagtggttctcaagctgtagcgtgcatcagaatcacctggagagctcgttaaaccgattgtggagccccagccccagctctgattgattcaccaggtctggggtgggacctgagaattcggatgtcaggtgatgctgctgccgctggtgcaggggccacgctttgagaaccactgcacccaaggaccttctccctctgaaaactgcctcagtgcttcctggagtgttaacaggtcccggtgggtagtaagcgtgccatgcccaggggtaacatgctcaattctgacggacgtttagtaacccagcacaagtgcggctaatggtggttgacacaggcacccaaggcggatgggccgttgtgaagaagagccagagaaacatggcggagcgcactgctaaggattacagcaaaggccttcaaagacggccggttcttcccctcagaaagctaacctagctcttacctggtgaacaaagacatcttccttggtgtcattcctgcagaacaggatgggtcgttaaggaagggacttcaacaaagccctcagctcctcactgaggtccccctagatgcccagtctaagctcagtgggcccatcctctccagcattccagttaggggtggacatggcctggggaatgggagggagagccagcagggcccccagaagctggtgtaaagagagatacacctaaaacctcagtgccaaacctggacttcacaaggaaagggcaggctggggaggcaaaggcaccttgaggaacctcagacagctctgcccctgccgggactccaccttccaccccaggctagccttacaacctgccagcgctgggtgcaactgtccctggccaacaccccctcccccaacccccatcagggttggaaaattccagtcttcttccttctatagtcaaggaggcagaaagtgcagatggggccagaggggcagaacaagtttgagaagggaacaatgtgtcaggaacttgctctaaacagctgccaaactttattctcatcctcagcctggaggtgaatcccagagtcaggaccactctcaacacgcgtgggaccaagggtgagagagaagaaaacattcacccattctctatcataagaaccccagtgggtggggggaggggagaaaggaaaagttttcctggaggcactctgcccccgacccagtctgccatttccagaattagacagggacccttccccagaacaaacgttttagctttaaagcacttggatctgcacaaaggtcagcctgctaagagggaactagggcctcccaggagagccaggccgggcaggatgcctgggctggggaagggcccactgggggagacctggctctgctcagaatccactgccacagcctctcccggtgctgaggggtggggctgcctactgaaggaaagcagcagcctctggctccttcctcctgacccccactgtcagcctcagtcccaacaggtggagggctcgaatgagccacagctctttaagggagttgagttgtgagtgctgccataacaggaaatcagttgaggattccagccgggggccctgaggcacagagaaccctataatacattctgccccaaaggcatgtcagagtaaaagtaatgaagcaattccagaaggtgagatgagaagctggcagggtcagagccaggtttgccaagttcctgaatcattaatcctccgctacccttgaagatgcggaggaggcttcctcttgtcacgaagcacacatttgtgctgcggttaaaggctttcaaccagcatcagctggacattgcaaccatgtgcctccgcaggggtcgatgaggttgggcgggtgtccagtcccacaggccagctgggaagacacccattccacccccgccctgggttccttggatacctgttgatgaatccgtaaccattccggacgttgaaccatttgacagtgcccaggacttggattgctgccaggcagagatgcagtggggacagtgagatggggggaagagatggagttgaactcagttttgagacactccaaaacaaaaaaaaatctagcctactgccttattacctattcaggttaccttcaagccaaccaggtttcactagtagcttcaaggtattcctaccctagtccaccaaatgaaatcacccacacagggactcaggctttcaaaaagccttccaactctaagtcacgttccccacatcctacaaatccagccccttcacctagaactgggtactcacctggtctgcaaagtgccgcccccaggtcataactgagggtttttctagccctcccaatgcaagggtccccagtgcacctgcttgccaggctcagaggtttgcctagttctaacccagtcaactaggcactgtgtcccgcccgggggcgtggccggaccctggggctttattctccaccccaagaccttagctgaacctgccggccccgccctctctcccaggaaggtacggcaggatttcccaccaggggaatccactttggtgcgcagctcccagcccagttagcgctctgggcctgcgggccaggccgcctttggttttccggatcctgccgggctccacactgcccctcccccagcccgccgacccctcagagccgccctgtgcgcgcctgcccctcacccagcaccggcttgtccgcctgactccgggccgggggggcgggggttcccgagaccgccgtcgccggattgccaggggtgcgggagcccggcgccgagggggtcccagcagcggggcccgaggcggctccgcccccgccgcccgccccgccgcctttctgcggctcccctgcgggcaccggtaccaccaccgctaccacccctgccgccgtcgcgggcaccgtcgccgcggggaccgctgtagcccccgctgccgcctccacctcgctcatcccgccgggtccagtaccggccacagccgccaccgccccggcccctccccccggctcgcgaacccaccgccctgctcggtcctcgcgccccgagcctcgcccacacgccggcagcgggcccggagccgaggccaatggcagcccgctgccgccgctcgcgcagaccccgcctcccgaccacgggccaatcccagcccagcagcacccccggaccgcacgccgaccccgcctcccggacttcgcaccgcggccccggcccccgccagccgcccagtaagtacacctgggccccgccccctggccgccacgtgacggcccccggcccaacccattggccggcggcccctttcccctcccccctccgcccctttccaccggccgcgggaaatcaaacgggccggtcgcgccccaaccgccacctggcctctgcgggaagggcggggccggggccgcagtgccaaggttgcccctaacgacctgagcgaggggcgggaatctgcagcctcggttctggcagtgagtagcaccgctcgcctccaccctcgagaccgaccttgcccgtatgctgccaggtgcagacgccttccggccaccaccgcccttggcaccctctccccacaggacggccctgcacaccctggggctgcgggatccaaccgcaggataggctggaaagcgcagcagaatggttttcccggctcacacttgctcccatgagccaggaccccctacttttcttttttctttctttttcttttcttttctttttttttttttttttgagacagggtctcgccctgtcgcccagactagagtgcagtggcgcgatctcggctcgctacaacctccgcctccctggttcaagcgattctcctgccttgagccacctcaaggtggctcccggcctgcccctacctatgtttgtattggaaacaaggtttacaagtagtacaatgcgcaattcttcttcgctgagtttgtttgtttgtttgttttgacacaaggtctccctctgtcgcccgggctggagcgcagtgcgcgatctgggctcactgcagcctctgcctcccgggttcaagcgattctccctcctcagcctcctgagtacctggaattacaggcttgcgccaccacaacctggctaatttctgtatttttagtagagatggggtttcaccatattggccaggctggtctcgaactcctgacctctggtgatccgcccgcctcagcctcccaaagtgttgggatgacagggtaagccaccgtgcccggccttcgctgagttttgatcaatgtgtccacccatgtggcccataccgaccgctgcagctctgatgtctaccgccctagactggctttggggtctctcacgtctgtatgccgggggctgtggtctccggccaggcgtcaagctccagcggactcgaggccttttgcacatgcggtttcctctgccgaaaacgcgccttcgtgtctccaggtggctctctccaagcagcagcttacgtgccactcttcgccatcacaccattccttatttttctaatggcatttttgaaaatatgacatgatcctgaccatttgcttattttatttccctgcacacagtgggctgtaaactccacagcagtaagagccttgtagttaagctggacgcctgcagcagtgcctggtacaacgtacacgttcaatatttatcgaatacatgaacggcccccattccacagatgagaggactgaggggcagtgcgaggcttgtaccaggtttctcgggagcctgggaagattaagaaaatgggccgggcgcggtggctcacgcctgtaatcccagaaaaacgaggctccagcagtatctcctccctagggccgcctcccccaccagggaggacgcgggtgcgcgttgtatttttagccagggcagcgcgccccggggcagcacacgtgcccccaggcgctgctgggcaagccccacgtgcgcttcccaagggctggcgtcctccgcgtctccttcgccgccagctgcccgcagcagccgcagtcgcctctcccggtcccggcgcgccctctgccggccgctcccggaggccgccggattccgcttcctcgctgaccctccacttgctatctatcgcccgccgcacccctccggccctttcagagttgaagattcggatttccggggcatcgggcacagtggacagaaaaagagaagagacaagaaaacaactaagtagcaagacgaggccgtgaagcatacaagaatgaccactggccttagactgttaaggaccgacttacccgtgcctagccctgagctcaagaaattggagaagcctaagaccaagactggggaaggcaggcaagaaacctcacagtgtgaccgctgcagcaaaagaatcacatggaaggcggagctcaggagtgggcccgttagctacaggctggagggtgagaagagaggacctaggaagggaagctgaacctttttgtagtaagattaagaaaatggccagatgtggtggctcacacctgtaatcccagcattttgggaggctgaggtgggtggatcacctgaggtcaggagttcgggaccagcctggctaacatggtgaaaccccatttctactaaaaatacaaaaaattagccgggcgtggtggcgtgtacctgtaatcccagctgcctgggaggctgaagcaggagaatcgcttgaacccagaaggctgaggctgcagtgagccaagatcatgccattgcactccagtttgggcaacaggagcgaaactccgcctcaaaaaaaaaaaaaaaaaaagaaagaaagaaagaaaaagaaaatggggcgggcgcggtggttcactcctgtaatcccagcactttgggatgaggaggccggtgggtcacctgtggtcaggacttcgagaccagcctggctaatatggtgaaactgcatctctactacaaaatacagaaaattggccgggtgcggtggctcacgcctgtaatcccagcactttgggaggccgagacgggcggatcacgatgtcaggagatcgagaccatcctgacacggtgaaaacccgtctttattaaaaaaatatatatatatatacaaaaaattagccgggtgttgtggcgggcgcctgtagtcccagctactggggaggctgaggcaggagaatggcgtgaacccgggaggcggagcttgcagtgagccgagatagcgccactgcactctagcctaggcgacagagccagatgccctctcaaaaaaaaaaaaaaaaattagcccggcatggtggtgcgcgcctgtaatcccagctactcaggaggctgaggcaggagaatcgcttgaacccgggaggcaaaggttgcagtgatttcagtgatctgagattgcgccactgcacttcagcctgggcaacagagtgagactctgccaaaaaaaaaaaaaaaaaagtggccaggcgcggtggttcacacctgtaatcccagcaatttgggaggccgaggtcaggagatccagaccatcctggctaacatggtgaaaccccgtctctactacaaatacaaaaaattagctgggcgtggtggcaagtgcctggagtcccagctactcgggaggctgaggcaggaggatggcgtgaacccaggagacggagcttgcagtgagctgagatcgcgccactgcactccagcctgggcgacggtgcgagactccgtctcaaaaaaataaaaaagaaagaaaagaaaagaagagaaaatgtgaggatgtgaggagaccagaggtgggagcattgcagggaaatgtactcctggctgttgaaacaacagctacactggcaacagctcaacagctatgtgctctccatccccatggaggagaattcgcagataccacggagcgatgcagctcattgtcctcttcagttgaaggatttgtgcatgtaattttctttttctttttttttttctgagatggagtcttgccctgttgtccaggctggaatccagtggcgctatctccgctcactgcaagctccaccccccggcttcatgccatcctcctgcctcagcctccccagtagctgggactacaggcgcctgccactatgcctggctaattcttttgtatttttagtagagacggggtttcacagtgttcgccaggatggtctcgatctcctgacctcgtgatctgaccgcctcagcctcccaaagtgctgggattacaggcgtgagccactgcgcccagcctttctttttcttttttgagacagggtcccactctgtcacccaggctggagtgcagtggcacaatctcagctcactacagcctccaccttgaaggctcaagtgatcctcccatctcaacctcccacctgtagttaactggcccactcctgagctgggactacaggcacatgccaccatgcccggataatttttttgaactttttgtagagagggggtttcaccctagtgaactcctgggctcaagccattgcccaccttggccttccaaagtgctgggattacaggtgtgagccaccaagcctggccataattttctggttatttaaatatttttaagtactatagataacaagggctccaggaattctagtgaaaaggcttccttctttttctgtcgcttcctttccattagttcctgctcacctgaagtgttctttacctgactgttttgttcattacttaaaaacaaaaacaggctgggtgcagtggctcatgtttgtaatctcagcactttgggaggccaaggcaggagaattgcttgagctcaggagttcaagaccagcctgggcaacataatgagaccccgtcttttcaaaaaatacaaaaattaactgaagatggtgacatgcacctgtagtcccagctacctgggaggctgaggtgggaggattgcttgagcctaggaggtcagggctgcagtgagtggtgattgtgcccctgcagtttagcctgagtgacagagtgacaccctgtctcaaaaatagaaataaaaaacaggccgggcgtggtggctaacgcctgtaatcccagcactttgggaggccaaggtgggaggatcacttgaggtcaggagttcaaaaccagcctgatcaacatggtgaaaccccgcctctaataaaaatataaaaatttagccgggcatggtggcacatgcctgtaatcccagctactggggatgctgaggcaggagaattgcttgaatccgggaggcggaggttgcagtgagccgagatcatgccattgcattccagcctgggcaataagagtgaaattgcgtctcaaaaaagaaaacaaaacaaaacaaaatcctgctttctcgactattgccctgtacctctccattgtttgaacaacaaatttcctgaaaccagtctttgctgtgtttacttcaactttctttcacaacccaccaacccaaatctggtttctgccccatcactccactgcgacagcttcagcaatgccccactgtcccttctcagttgagacgtgcagtggatggctttggttccctttggactccgtcaaatgaagtgttcctgccacagcttccacaacccaaccttccctgtcacctcacacctctcctgttatgcttgttctccttctccaaccccactgtttcctaggccatgttttcctgtcttctctttttttttgtttttttgagatacagtctcactctgtcacccaggctggagtgcagtggcacgatctcagcccactgcaacctctgcctcccgtgttcaagtgaatttcctgcctcggcctcctgagatagagtagctgggatttcaggcacgcccagctaatttttgtatttttagtagagatggagtttcaccatgatggccaggctggtctcgaactcctgacctcaagtgatcacccacctcggcctcccaaactgccaggattatagatgtgagccatcgcacccagacaacccttctttagattgttctatccatttccctggcttcggtgaccactttctgatggctctcaaatttgtgtctccactcctgagtccctcccaccttctgccagatgcccaagtcagggagtctctccagccaacagctcctcaggcttctggaatttgatgcatccaagtctaagcttctctttttcctccctccgttctccctcctcactgagtttacgtcatcaccacttatccacagtcattttgcgtagaacagtctccctggaggcccaggattagcacaataaaggtgaagatttgtgtgatcaaactgagataatatttgaacgattgaaaaaatggtgtcagctgagtgcggtggctcatgcctgtaatcccaagacttttggaggccaaggtgggaggatcgcttgagcccaagagtttgagattagcctgggcaacatagcaagaccctgtctctacaaaaacttaaaaaaaaaaattagccagatgtggtggtgcaccctagctactcaggaggctgagttaggaggatcacttgagcctgggaagtccaagctgtggtgggccctcttcacaccactgcactgtagcctgggcaacagagcgagactccgtctcaaaaaaaaaaaaaaaaaaaagaaagaaagaaagaaacaaaagaaaagatgatgtcacctctatcccctggtgccatctactcccagaaacttttcactccaacttttttgttgcagcccaaatcagagtttacctcttctctgtcctaataactactctcttatttcccaacagcaacagtgtttcatacccacactgtccatcttatcctctcacatttatttatttatttatttatttatttatttatttatttatttatttatttttgagacggagtctctctctgtcacccaggctggagtgcagtggcgcgatcttggctcactgcaagctctgcctcccgggttcacgccattctcctgcctcagcctcccgagtagctgggactacaggcgcccgccgccaccacgcccagctaattttttgtatttttagtagagacggggtttcactgtgttagccaggatggtcttgatctcctgacctcgtgatccgcccgcctcggcctcccaaagtgctgggattacaggcgtgagccaccgcgcccggctggcacatttattgattgattgattgagacagagttttgctcttgttgcccaggctggagtgcagtggcgcactttggctcactgcaacctctgcctcctgggttcaagtgattctcttgcctcagcctcgcaagtagctgggattacaggtgtgcaccaccatgcctggctaatttttgtatctttagtagagatggggtttcgccatgttggccaggctggctttaaactcctgacctcaagtgatctgcccacctcggcctcccaaaatgctgggattacaggcgtgagccactgcgcttggccacacatttattctttagctgctctttccactgtccttccctctttgcaggctgggctagcactctgtcaaagccttgacattttctccagcctctacctccttgtcttatctgctgtatgtttttgtgtgcattttcaatttccctaaataacatcttgttatagatttcgttctgatcttatttgcagttagtactatgtggttaaaatccacccatgctctatgatgatcaaagctattgctgcgccatgctctgcagtatgagttgtgccacattttacctgctcacagttccactgaggagcacccatggcacctccaattctcaaccacaacaaataatatggcactgaacttttttttttccagacatggtcttgctctgtcaccccagctggggtgcagtggcatgaccaggggtcactccagtcttgacctcctgtgctcaagtgatcctcccacctcagcctcctcacctcaagtgatccgactacaggctcatgccaccatgcctgactaatttttgtatttttagtagagacggggtttcaccatgttggccaggctggtctcaaactcccgacctcaggtgatctgcccacctcgacctcccaaagtgctgggattaccggtgtgagccaccgtgcctggccgaatcatttctctctgttttgttttgtgtgtgttttttttttttttttgagcctccctagcagctgagattacaggcatgcgccaccacacctggctaatttttttgtttgtttgttttcttttctttttttttttgaggtggagtctcactctgtcgcccaggctggcctgagtgcagtggtaggatcttggctctctgcaacctctgaagcccgagttcaagcaattctcctgcctcagcctcctgtgtagctgggattacaggcacctgccactgcgcctagctaatttttgtatttttagtagagatggggtttcaccattttggccaggctggttttgaactcctgaccttgtgatccacctgcctcagcctcccaaagtgctgggattataggcgtgagccaccttgcccggccgaattatttctcaaggaggaaacttctttttttttttttttttgagacagagtcgcccaggctggagtgcagtggtgcgatctcagctcactgcaacctccgcctcctgggttcaagtgattctcctgcctcagcctcctgagtagctgtaactactgcccgagtagctggaactactggcacatgccaccacgcccggctaattttttgtatttttagtagaaatggggtttcaccgtgttagccaggatggtctcgatctcctgaccttgtgattcgcccacctcggcctcccaaagtgctgggtttacaggcgtgagccaccgcgcccggcccaagaaggaaacttctatgtgaacagaagagaaatgctcaatatataaattagaaagaaggtcaggctaagtgtggtggctcacgcctgtaatcccagcacttcgggaggccgaggagggtgcatcacgaggtcaggagttcaagatcagcctagccaagatgatgaaaccccgtctctactaaaaatagacaaattagccaggcgtggtggcaggtgcctgtaatcccagctactcaggaggccgaggcaggagaatcgcttgaacccgagaggcggaggttgcagtgagctagatcgtgccactgcactccagctcgagtgacagggcaagaatccgtctcaaaaaaaaaaaaaagtaataatgttgctttgaacatttatgtacaacatttctgtttttttcttttcttctttttttttttttgacagggttttactctgttacccaggctggagtgcagtggtgtgatcacagctcactacagccttgaactcctaagctcaggcaatcctcctgcttcagcctccccagtagctgggactacatgtacatatgaccacgcctggttaatttttgtgtgtgtgtgatggagttttgctcttgttgcccaggctggagcacaacggcatgatctcggctcattgcaacctctgcttcaagctattctcctgcctcagcctcctgagtagctgggattacaggcatgcgccaccacactaggctaattttgtatttttagtagagatggggtttctccatgttggtcaggctggtctcaaactcccgacctcaggtgatccacccgtctcagcctcccaaagtgttgggattgcaggcgtgagccactgcgcccggctattctagatgttttctaagagtggaatcatagaatatgtgaccttttgcatcttgacttttttcacttagcataatgttttccaatattcatccagttatagcacgtacttcatctctttttatggctaaataatattccactgtatagatataccacattttaaaaatccattcatctattgacagacatttgggttctttccaccttttttgctactgtgaataactgctgctaatgaacactcacatgcccggatttgcttttttttttttttgagatggagtcttgctctgttgcccaggctggagtgcagtggcgagatctcagctcactgcaagctccacctcccaggtttgccattctcctgcctcagcctcccaaatagctgggattacaggcgcccacaaccaggcccggctaatttttttatttttagtagaggcggggtgtcaccgtgttagccaggatggtctccatctcccgacctcatgagccgcccgcctcggcctcccaaagtgctgggattacaggcgtgagccaccgcacccggcccggattttctttgagtacctgtttttaattcattgggagtatatatacgttggagtggaattgctgggtcacatgaacaatacatactttgctttgagaaaagcaggtgttggacttttgaacaatgtactcacaaagttgtttgcgtttttttgtttttgtttttgttttttttttttacaaaggaaagggcatgaatttcagaaaattgaggggaagtagctgggggttagcataacaggctacacaaatgtagtaattcaatctagtgtttgcagttcacatgtatcgtgtcacaagactttttttttttcttttttaagaaacaggttctctgttgcccaggctcaagtgcagtggtggggattatagctcaatgaagcctcgaactcctagactcaagctatccctccacctcagcctcccaagaaagagtagctaggtctacaggcaccagccactgagctgagcttttcttgtttttgtttttttaattttttatttgtagagatgggccgttgttatgttgcccagtctggtctgtaactgctagcctcacgggagcctcccaccttgacctcccaaaaagctaagactacaggtatgagccactatgcccaacccatgttgcagaatttttgcaacgtcctgaaaaattgggaagttcaggcatcattattattctcattttatgggaagaaaattaaggcagagctatctgaagtaattccttaaagacacaaaagaaggatgagatcccaagatctttggtcgcttgtttctgtctttttttttttttttttttttttgagatggcgtattgctctgtcgtgcaggctggagtgcattggcgagatctcggctcactgcaatctccacattctgggttcaagcgattctcctgcctcagcctcccgagtagctgggattacaggcacgcaccaccacggcacggctaatttttgtatttttagtggggacggggtttcaccatgttggccaggttggtctggaactcctgacccaagtgatctgctcgccttggcctcccaaagtgctgggattacaggtgtgagccactgcgcctggccgcttgtttcagtcttgttatccaacaaggcagccatgaaggtagtgcaagaaacccaggaattggaagaagactacgaagtttcaggaaaagcgaaatggggggcggagagagggagggcaaagaaaataaagttgggaagatagctcgtctccagcttcatggtctcctatgattaagacaatgtcaatgtaatctaacataccacttttttttttttttttttttttttgagacagagtctctcgctgtgtctcctaggctggagtgcagtggtgcgatgtcggctaactgcaacctccgcctcctgggttcaagcgattctcctgcctctgcctcccgagtagctggtacaggcgcccacctccacgcccggctaatttttttgtattttcagtagagacgggggtttcactacgttggccaggctggtcttgaactcctgaccttgtgatccgcccgcctcggcctcccaaagtgctgggattacaggcgtgagccaccgctcccggcctaccactattttattttatttatgtattatttatttatgtttttgagacttgagtttcgctcttgttacccaggctggagtgcaatggcgcaatctcggctcacggcaacctccacaggagaagcgattctcctgtcccagcctcccgagtagctgggattacaggcatgcgccgccacgcccggctaattttgtatttttagtagagacggggtttctccatgttggtcaggctggtctcgaactcccgacctcaggtgatccgcccgcctcggcctcccagagtgctgagattacaggtgtcagccaccgcgcccggcccaccactcatttttatagacaattttttctaagggacctcgtagacaatactttggggaaccgcagagcacagttggggaaaacacagtaataccatctaagtttctttactgaggacctcagagccgaatggcctctatggatgccatagagaccaatacggactgagggtttaaagaagatggtgtccgccgcaggaccgctctatcttctcgggtgaactctatggcagagcataggcattcgatttagagaagtgaagccgagatgggtgggaacccgaccacactagcgcgctagaagagtggggcggaaagacatctcccgcgcatgtgtggaactggggggactgattccaagacaaggcgcccaccccacagagcaagttttctgaaacgtgtgagtcgtttaagtccagttaaagccgaggtggggcgtatcctgagacgcatgcgttctagacgagacaagtgatctagcggcgtggtcttttcaacgcctggcgtactgacggcgtctgaggtggaaggggttgtttaggattccgaacacgcatgcgttctgagacccaggcgtttcctttagagggtgtggagtgcagggctccttattgcgcaggcgcaaggactgcccggtaggacgagcggtctatcaaggggagggaagatgaggttgaagagattaaaaaaccgggtgcgcctgcgcgttgcagattagttgaaaacgctcagggtttgtgaggggcggggtcacgtatgcgcgtcattggacgggtcggtgggagggagggtggagatgggtagggtgtgtgcgcttgcgcagtgcgggggtggagggcggaggagatagatagcacgcttgcgcggctgtcatagggctgcttggttggtcagtggggagtcggcgcctgcgtactaagacccgtgtgcagcagcggcggcggcggtagaggcggcggcggcggcggcagcgggctcggaggcagcggttgggctcgcggcgagcggacggggtcgagtcagtgcgttcgcgcgaggtgagagcgggcagggcgcgtgtgcgcggtaccttggcttgggcccgggagaagatggaactgcgcgggggtcggggagggggcagaggggagcggcggccgccgccgcacgggttcggccagagagcggcgcgaggtgaggagaggcgcgggcgcgcgccccggttggcgcgcggggtgacggttggggttggcccggtgacgttggagcgacgcagggcgggggacggcgagccgcgaggcagccacgcgggagaggccgccaggcggccacgccggggcgagggccaggggccagatcggcccaccggggcaagggtacctgggccgttgaggacccggctcagcgcggccacgtgaggtgggggagggggctattcggtgagagggcatgatggggggggttggcggacggccggggggaggggaggcggcgtggctccggcctggcgcagtctctgaggagggggcggccgcggcaccggaagtgccccccacgggaggctgccctcggggtcgcaggccgcatggccaagcgtggaccggggccgcatggcagcgcggggacccctccccccaggtcccggccaccggaagcccggaacggccacatggtcggcaggagccggcagcccctagcgcggggagctagtcctcgcgggggttccgagggggcctgagattttgaggagtggaagccggaggctcgggtcctaatcaccccggagggcctgctgcaggcatatgttagcgcttcccaacctcaagggccccaggagctttcctgaaaaaccctcctgtgaagtgtggcggtcagccaggtgtaagtggcaccccttcgagctgggaggccggagaaatggggaaacagggcgtttggacaggagcccaacttttctgtcggcctgggtggacagcgcctaaaagcctcaggcagatgagtttcccaccgtgataggcgttcttcaccttgtcactgtcttcctgttgtaactggtttgggagttccacggtttcgaagtccttaactctactagcctagtatgattttctactactcactactaccaaccttttgctttcattttattgtcattcaccaccccccacctctcccactttctactgactgtactggcccggcctgaaaagccgacaggacagatgcatcctgggaaaagtgggagggccttccaggagaggctgggttcctgggttctctttgggaaccaagatcgaggtgtttggcagggggatcatttcggaaacaactttgctttctcccccttggcttgttgcaagtgcatgttggcgaggcgggaatcccccaaagaggccttgtggtttcctgtagcagtgactggtttgtgtgtggatgggggggggcagtgtaacagatgggtggggccttgtcctccggtctccaccctccccccccccaattagccctgcccttttgctggatcatagctgctcacctaattatagccctggctatatgtggggaagaggggtggttggtttcagtggcaagtaacacctgagtcctccccactcccaggaagtaggccttttctcatctctgagatttgacattccagctccctagagccttcctttcccaagccaccactttagctttgatttatgggggagaaaccagctattccaccctcccatacacacaccagttcttgagtatatttgagcccagtcagtattttaagttcaggaactttgactttattttaggtgggtaatggaataaagagttgggaaaatgtttctggagagaaatgggatagattggaggtcctgttgacctccatgcttattcacttcagttctcttcttggctctagttggaatcgaagcctcttaaaatggcagatgacttggacttcgagacaggagatgcaggggcctcagccaccttcccaatgcagtgctcagcattacgtaagaatggctttgtggtgctcaaaggccggccatgtaagatcgtcgagatgtctacttcgaagactggcaagcacggccacgccaaggttagaatttcacctccgcatcttgccttccccatgcctccagtatctttggcgctcccagcagcaagctgccaacagtgctgactttcctttaactctgcttttactgtctgattgtttttgtttagcgctcagccttcatacccattcagacaactacacctgctccccagtcttcagcctcttctgtggttacccttctgtccccgcatcattctctggcagtccctccgtttctccagctttgtgccaatctcttcaattcataggcctttatgctctagctattcagttgctccttccttattcttggttttcactttttctttcttcccttgagccgttgttaagtggttgcttccatcacgttgcccagggtttctccaattctacgccttcccctggagggactcctgcgtcaattctgagctttcaggtcaccttgctgcttcgttccccagttctagctttccctttggaactctgacgcaggatcaaactgcccctacctgccccatcccactctccttgggttccttgagcctccatgctttcatgggttttaacattcttgctagcacttccctcatcacctcagacttttcctgtctctttagaatttcaacctgattcgttcttgttgaatttcttgtggtgtttttccttaatcagtttttccatcttttgacttgacattgatcttggattattctctagtgtctggatccctctctgtgctcttctggcttccttattttctagctacatagttatttctgatctccctgcaagtccttttcttcagctctttcacatttcttagtttcttatcctttcccttctaccttccttattccccagtttctcagctccttctcctggtgtccggaaaactcttcgaaacttttactcagactcctcccactcccctagactcttagcatcttatcttttatcaaggtaactgtcttctccaagcctgccatgcagttttctattgtgctgtcaaccccaatctcaacggtggttttttagcctctgttttttttctttaagaggctttactgtttcttgagttgactggttcaattccaacactccagtctttgccccaacaatgtaattctgacttccctcatcaggcaaggtcaatttgagcctttatttcctccgttttagagtttggttgggtttctctttgtgatgcatacatacaggtccatctggttggtattgacatctttactgggaagaaatatgaagatatctgcccgtcaactcataatatggatgtccccaacatcaaaaggaatgacttccaggtatgtagatggtctggatgaggatgggttagcggtttatggtggagggaggggttgggggatagggactgaccaggagagcttgtgctgggagagaggagggaaatggcaggagagggtgtttggtattagtttgctatcagtccagtttgtctatcagagcctttactgtcatgtcagcctccctgggcctactaccttcagcctccttccctatctgcccccagctgattggcatccaggatgggtacctatcactgctccaggacagcggggaggtacgagaggaccttcgtctccctgagggagaccttggcaaggagattgagcagaagtacgactgtggagaagagatcctggtatggtgcctccctccctgcttctgtgctcagctttgttctgtacgtttcttcctgagctcagacatctcttggctatccctcttgcttctccagatcacggtgctgtctgccatgacagaggaggcagctgttgcaatcaaggccatggcaaaataactggctcccaggtgagtgtgacaaatccctcactgtccccttcacattttgttgtcctcagcagagctgctgtagtcttaattgtttcaggcttactttctgcccctagcctggctctgtcctccctatccttcctgttgaaggtattatcctgtcttactaatttctctctcctacctagggtggcggtggtggcagcagtgatcctctgaacctgcagaggccccctccccgagcctggcctggctctggcccggtcctaagctggactcctcctacacaatttatttgacgttttattttggttttccccaccccctcaatctgtcggggagcccctgcccttcacctagctcccttggccaggagcgagcgaagctgtggccttggtgaagctgccctcctcttctcccctcacactacagccctggtgggggagaagggggtgggtgctgcttgtggtttagtcttttttttttttttttttttaattcaatctggaatcagaaagcggtggattctggcaaatggtccttgtgccctccccactcatccctggtctggtcccctgttgcctatagccctttaccctgagcaccaccccaacagactggggaccagccccctcgcctgcctgtgtctctccccaaacccctttagatggggagggaagaggaggagaggggaggggacctgccccctcctcaggcatctgggagggccctgcccccatgggctttacccttccctgcgggctctctccccgacacatttgttaaaatcaaacctgaataaaactacaagtttaatatgaagcccccaactcagctgcttatttgaattaaatgggtgtatttggaagccacaaaaagactgaactctgccactgagttcactggaacccgctgtctatcactttgacttgctgtggacctgccagccatccccccaccctccaagcaaccttgacctattccagacagttgggtgggaggcaacacaaacagcagcagccaggggcagtggcaggtagattttattggcctgggacacacaggggataccctcacccacgatggggtggggggtgtggtgttgaagatataatctgatggtcacttgtggtagaatcgcgggttctggctgtgttggatgaaggggagccgagggccaggttggctggtagctgcaaagcccgactggtggtggtgatgaaaagagggctttgtcactgggcatactctcccttccacttaataccctactgataaccacccccaaagaggaaggaaaaaccagatgatgtgggccacctgtcctacctaatcctgcttttccggatccctagtgtagggattctgacaggtaaattctattaccattcttacctttcctgctggctgcatctgcacagggagctggggggaagcaaggagtccaggggctggatgcagagcctgggggtgcatggggcgcagagaggactgcagagaacagagtcagggcctgaggcatactgaagctccccttaacatatccctaaccctgacctcccaaggtgccatactcactgagtcggagaagccagtctgctggttagcatgttccatctgcttttgcaaggacagggcaccaccaggctggaggaaacctaggtggggaagaggggcatgtgagatgagaatgaaacagggaggggaggacctgagagctagagctcctgcatgggatgttatcacctgtctgagtgggctgaaagtggccatgcacagcatagggctgtggctgtggctgagataggtactgcactgcagggaatgccgaaggagctgagaaaggaaaagacagagccattaaaatcttttactgaatggcattcctcctttgaccttgaggaaggccaagccccatccctcctattactcacctctgagctgctgactaggactataagctggctgtgtgggcccatagtgaggtgggggctgagcagtcccataggcaccaccaggactgccttggaattgtccatgctctggtgtccctgcaaaagcagctgctgagcccacgtagtgccgggtctaaggaaggagaatgagaactcgcctacaaactccttgaaagctgaaacccagtgacttgtgtgtatctgtatgccccgtttccccctaaacttaagtgcttgatatgtttgtgacttgaatactggtggcaaggatgcatggatggaagtactaggggctaggcatccaatcctactctcaccgtaagcacttggggtccaaacatttgtttggctctgtcagctgccatgagggtgcctgggcgattgtgtcctccagggctccctagaaagggagaagggcttcatgatgctgaaatgggaggctgtgacctccaagaaggccggttccatctggtggtttctttagtcctcaccctgcatgctgaggagatgagttcctgtgtgaacagtcaggctctgctggtatgcagctgatgttagggtggtcaggtcactggagtgaaaggaagacaggtcaaagtcaaggacagatgccttctcttttgccattaaacactggttcttttactacctgatcccagttccacttggcccccatttcagtttttagcactctgatcccacctctgttcctttcgcctccgtttttcttcctcatgtaaaactttcttgagctgcaggaaaagctggtgcttctcttcctgtagagccaaaagcttctcctccaacttcagaatctgggatggggtgggaaaagaagatgaaggcagggagagtcaaacgaagaaatcaaagctgggaaagttcaagggactgcttacttgttccttggtctcctctaatgacattctctcttccatctcctttttcttccttctctcctgttcttccttcatcttctgttccatcatcttatccacctcttcttcctctggagaatcaggcagaatgaagaagaggcagggtagtgaaaacaattccaacgttacagattgaagaccagcaaaacccagtcatcccaacacgcctgtatgctctttgcctcgaggggacaagctccccatcgcggcaatagggaacggaaaggctttatcaggtgctctccaaggtccttcccatctcaagggttctggagcgtggaacaggacgcttaaatcccaccacaacggggctattccttccctcctctgcgctcggcagcgggcgcgctggttggccggtgggttgaggccagccttgaggtacaggagccattctgggccgtgcgtccccctgctatggccccggctcaccctgccgcttgcgctcccgctccatcataatgtgccggtgcagcgccctggccatggcgttggaaagcttggggcgctccaggagtgcgggcatggtgctgccgtgggcgctcgggccgtgggcgcccggctgtctctgactgccagacctcagacggggcctgcggggaggcgggcgctcagagggggccgcgcccggcccaggcggaagcccgtccgcccggcccgctcgccgccccggtcacgtgtcccaggagcccgccacccggccgggaccgcagccccagtcccaccgcgcgcgggcggcgccggggtccccggctcgctgctgccgctccctgcccagccagcgcggacgactgcccttcctacccgccttctctgcgctttctcagcggctccgacgcgccctggcccctgcgtcacatccggcggcccggccgagtccttccggagtcacggcggcggccgacctcacaggtgaaagaaggcggaagcgcgctgcgacgggtgcccgcggcgtacaaaccccgtcgccgggaacgtgagcgacgacggctgcagactggccttggcatcctcagctctctttaatttcgcgggcccacctggtggcaccccaggggacgcgggctccggagaggggcgcgcgagagagaggccgaggcggaggctctgagacggtgtttattggctccttagaaatcagagtcagtaacaactgtacagaggcccccatcttccgtgcgcccacccttccccactcccgcccggtggccccggaaaaagcagcttcatgtgggcacagggagagactcctctgggattcacagtaaccagaaacaaaaacggaaataaattaagtgatgtggggtaggggagtaaaagggagtcatgttccccaaatcagtgcatgaagaggggtaccagggcctggagctgggctcccacgactcctcccatcagacggagtgctgggcctccggacatggagctgtgccacttgccacctacatctgagagcctgcctacatgctcctgcgcggctgccaagctccagcacctgcgcatgccacgagtcacgggaatgaggtggaggcagtcgccactcagagtccatgggcccgcggcccgactgtgcttgtagtagtggtgtctcacccctcattccacccgtaccagcagggcacagaggagtgtggcccccttctccttagtgacccactcaagttcggctggactgaagtgagggtcaggaggttctccaagggcagcggaagggggtcccggggtgtaggagccagggcgcacacacacctggaacgccacctgagcctggtgcgtccgctgggatttggggtcccggaatctgtcagacaagaaaaaataagggagtgaagcctctcgccccatcacctcccccttgcaaagtctgttccaaccacacaagccttgctgtacctaggaaatactcccaccttatgggaacttcgctctagctgttctacctgaaatgctcttcctcccaaagcctgctcagctacacccttcacttccttcttcaagcctttgctcgaatctctcccaccttcttaggatgtccacaccaaccgcactgctgtctccgccccattctttctctgtttccatagtccttacttattacctttaaaaatactaaatactggcggggcgcggtggctcacgcctgtcccagccctttgggaggccgaggtgggcggatcacgaggtcaggagatcgagaccatcctggccaacatggcgaaaccccgtctctactaaaaatacaaaaattatccgggcttggtggtgcgtgcctgtagtcccagctactcaggaggctgaggcaggagaatcgcttgaacccaggaggtggaggttgcagtgagatcacgccactgcactccagcctgggtgacagagcaggactccgtctcaaaaaaaataaaaataaaaataaataaataaataatacttattacgtatgaacattgtagagagaaaaggcagaagttccacaagagcaaggttcctttttttgcccactagaagagtatataagtagtatttgttcaatgaatgaagaaagggctgagttggagactggcagctagcaagacgagatgagaaaaggggagggcgaatcatgaagaccccagtggctgcgcttgggccctctccatccgagcccctggaaatctctccccacccctcccagtactcactgcactttggaggccagggtctccgccccagcatattgaagggagggggaaagcagcacaggagggggctgctcctcccgaggaggtgcacagttctcgccaggctcctcgaaccctaccccaggttctcccttcaaaggacggcagctcaggatggaggcagtacctgggaggagaactgggtcaggatagccctttttattcctccacagccccccaggctcagcccaccttgcatgggcctactcgccagtacctgctcccagctcccctcggtccagcactctccgtacagcggcaacattgctcccgtgatatgccatgtgccacttcttggttagtgtcccagcctccaggcggggattcactctaggaggtggacaagcggggcagatacaacgaaggccactgactccccagtggaggagcttcacgaggctcttccttagacaggaagtccctggcacttcctggcttttccttagacaggaagttctattacttcttccatgcaccctcttgggatccccgtttctccagggggaaaacagtaggggaaaggcatgaccttgcccatatgtacctgaggttgaacctgcaccagccaaagggcagtgcatattcccggggaggctcccctctgcgcctgtgggcctcgtctcctcgcagcttccggcaagactcacagtagcacaggcttcgctttggcggaggcatgaaataatcttctgcgggacagtgagtagcaggcttggtgctgtggctcccacctcaaccacagtggcaccctccagctgctctccaaggctctaggcctggccctgggaatgaagtcagttctggcggactgtgggactcaccgggaagcagcaggagttcttggaagcgagagcaaagggcatggtactcgcagctctttagaggactagcggcaggtggtggaccccagcacacactctctttgatacctgagggagcagaggggcacaggtcacaggagctgggctagaagggtgagggtgggggagtaggggcaggagctgggtccctttgggctggcacaccgtccaccatgtctgctttctccatgtccccttgggttccagcacttttcccactggcagcccctggctcagggttcacgattgtcacctgcaggggagagggtagtcagacagagcttggtcagaccccagggcctgctgatccctccctggaacagagatttcccctgtcctggacagcgcagactctcaggcacccctcctccctgcccccactgccactaacctgctcacactgcccatagaggtccacaagcgcatggcagggctggggcacatctggcacagctaccccctggtccaccccattaacatgaagatgcagccccccagagctgtccagccgcagtcccaggatggtgccttcagggcacgtgtccagattgggcccaaacttctcgcagatctgggaggagagaccggctgtcttccagaggtcagactccaccgcggcagctgtcccgccctttgctctgcttccttttgccagtgccttggctttgcctccatgcttgcccactgccgaggttctcctcccactgcagttacctagagcccctccccttccccaaaactggcacattctcaatggcagggacaccgcaggaagcagcaggcctaagactgaccaggcaatgctactcgcccttgcctgcccattactgttccccttttacacctgtggtcctacctccaaggctaggggcccacttctcccttctggccagcccttctctactcacaggcctggtcctgttccttctctctggctcctactcaccttgagaccgttgtggaagaccccacggccccgcagcagccaggctgcccgtttgagggcacaggcagaagcagggaagttgagcctctcaggcgcgcaggtgatgactcccaggacaagggaagatgtccactgtcggtttaggaaatctatccgcacctggggaagaaagaactactccataatcacagcctcctgggaagaaccaggctccgcaccccagccagagagggaatactgcacctcccagaatgtggcctgggatgctgccttttcttatgcttggaaggaccagaaaacgctaatttagttgtttctttccctctttttttttttttttttttttttttttttaaaaaaaagaaccgccagccgggcatggtgacccacactgtaatcccagcactttgggaggctgaggtgggtggatcacctgaggtcaggagtttgagaccagcctgaccaacatggtgaaactccgtctctactaaaaatacaaaattagccgggcgtagtgtcatatgcctgtagtcccagctacttgggaggctgaggcagaagaatcgcttgaacccgggaggtggaggttgcggtgagccgagatcataccattgcactctagcctgggcgacaagagctaaactccgtctcaaaaaaaacaaaaaaacaaaaaaacaaaaaaaaaacatgctgtttgagccttgaccttgctgttgcctctgtaaggatctctaaggattcttattcctaggacttccttcacctagctagttttcttttcctttctttttttttattgagacggagtctcgctctgttgcccaggctggagtgcagcggtgcgatctcggctcactgcaagctccgcctcctgggttcaagccattctcctgcctcagcctcccgagtagctgggactacaggcgcccgccaccacgcccggctaattttttgtattttttagtagagacggggtttcaccgtgttagccaggatggtcttgatctcctgatctcgtgatctgcccgcctcggccttccaaagtgttgcgattacaggcatgagccactgagcctggcctttttttctttttttttttaagatacaaggtcttgctctatctcccaggctagagtgcggtggcgtgatctcggcttactgtaacctctgcctcccaggttcaagtgatcctcccacctcagcctcccgagtagctgggattacaggctcgtgccaccatgcctggagaatttttgtattttttttgtagagacagagtttcactatattgcctaggctggtcgcgaactcgtgagctcaagcgatccgcctgccttggcctccaaaagttctgggattacaggtatgagccaccgcacccgggctcagctggctaactttcacatatctttcagtttgtagcaaaaaggcaccttcttctggaaagccctctctgctcccacatataggatcaggcatttctcttggactcctccagcctgtccctactgcttccctcaccaatcaccaggtagggacttcgtggtaactgactgatgaccctcattacaggctatgaataaaagcctaggaagctcatccaagtggcttgctttctttttctccacacaaaaaggccttttttcaggggggttggccatgggtcactgtggagcgagagaagctggggatagggagggagaacccacctgcaccagcagctggggcaccagaggttggttgatgacaacgatgccctgattgtagctggccacccgtgtggccgtacggttcccattagacaaaaggatattcttcccatggttctccaggaactcgagggtggtgggtataatacccacttcattctggccctggtgtggaggaagggactgagctgcatgggttgccaatgccaggactgacccaccccactggagtttgcacagatcctgagtgtgagcctccacccaacgatcagagaacccagaaaaggcctggcatccaacggcccagcaactgcccatccatgtgcacagcagaccatgctgcagcctcttactcccaggccatgctcctcgccctcgtcatcctcctcgccctcactgccggtgtctgaactgggggaaggaggctgggtgccttctgactcctccagtctcgtggaactgacaattgacacaccgcggactggcccgtagagatccaacacagcccacacgttctgggaggcacacaagacccagaaaatcagagatcagcagaagacctcaaccatcctcccagaacccaaggaagcgttcaggtctaccttggcaatgccagtggctgcaggccccatatcctctccatccaccaggatgtgcatcgtgtcatctgccccccgacgaacacccacacggctccccacctaggaccgaggtaggacaaggacggacgatgttcagcccacctctccctgccacctccactcccaacccctcccctgtccctggagccagccacttcacccccagcctctctaggttccggccatagttcatcctctggagctgcccatcacgcctcacttcacagctggataccatccaagtggtcttcgtccggagctctggcagggaaggaggcagccctgggccaccaccgcctgccccgggtcccatctcccccggtgctagtgtggtcagccccagccgcagggaacctgcccacttctcatctagctcttccactttcacctacgagacagagaaaacataagctggccctgtcgtgatgggcctcgcagcccctctgtcacatcactacggcctacctcaaagacttcctcagccctcagctccttggtactgaagacaaggccatgagcatagccagcggcacgcactgccctcgtgccatcctcctctagagtgacgttcttgccgcaagtactgtggaatcggtgagccacgccagccactgtgaagagatggcaccagtagaaggggtaggattggggcagcgagcttcaggcagaacacagagcaaagctttcagatgaaacgaaatggggatgccaacgccccatctgccatctgccattacacctcagggcctcctgacacctctttattgtattttgttgaggcagagtctcgctctgtcactcaggctggagtgcaggggcacagtcgtggctcactgcagcctcgacttcctgggatccagctatcctcccacctcagcctctcaagtagctgggaccacaggtgcatgccaccacacctgcctacattttgtatttttggtacagacggggtttcgccatgtttcccaggctggtctcaaactcttgtgctcgagagatccacctgccttgaactcccaaagtgctgggattacaggcgtgagctactgcgcccggccctgatacctcttttcaccacagcaaggcccatttccaaacctggcatgctcagcttatggtgtcctggccccttggtggcagggaagtgtccaggctctaagtaccaggtgtaacctccccctcactggctgcttgccaccgtgggctgtcccttccctggagccggcagctaccccagccaaccgtctttgcagaacctctctaacctggaaaccctactcctcaggtgcacagcaggcaagcagagcccgtccagcccccgccctgctgccgcacctggggagtgcagtgggaaggacttctcggtggcagtgttgctggtcgccaggctgttgtccatggggccggtggcattggtgatggacacttggacacactggccatagagatcgactaccgcatacacctctggggaggagagggaaggtcagaagcctgacagccaggtggtctgggctgagggtggcaggctgaaagccacatagtcacctttacccggaggcaggcccgagcaggcagcgccttggtcctggccgttgatgaagtagtgcaggtcgcccttggcagttcgcatcatgccaatgcgtgcacctgtgcccagcgcatccaggtcacacccataattgttgcgcatcgtgttaccgtcttgcatgatggctgtaccactggggggatggcagaaggggtgagtcagcctgccaacttcaacttcacattggcccctgcccactccctgtctgtcagaaccctccaatgtcttgggctggtgtcttgatctgggtgtaaggcccaatcctatctcctctgtccctgggatccccttaggaaaaagcaagaactgcctaagatgaaggaggactgagcccctgtgggcctgggcaggacttcccagaattcaaggggaggggacaggtagatcccctaggtctgtcactacccacagccaccataggcccaaaccttgcttccctgatcccagccagctccactcagccccaagctggtccccaaagcaggaagcccaacctcagcatccatgtgtcatagtcaatgtctgtcatggtgttggggaattccaggtcttcaggccgaatagcagtcactcctgggaggaggcaggggtaagtcaaggccgatccccaaggcacagacatccaacagcccccaacacacacagacggccctcaccagcctcaatggagcctgaccagcggtccaccatcttctgaatgacaatttcaaacagctctccatcccgcagggccctgccaggagactggcgatcagagaggctctacttgcatggctgaggctgggcaggaggaaggtggggacatgaaagttgagagactgaccggttggagatgacgatggcgtcattaaactcgctgcgacagttgtggcggagggcggtgcggcccccgttagtgatgactgcgttactgccgtgcagctgatggaagcgcaggtcagagcccccggcccctgaggacggagagcttggagacacctggttgttcccctcagggagtggttcaggaactggagccacctctgtaaaagtggacatcacccatcaggtctctaggtgtctctcagacctcccaaggccaccctaacccccagccccagcccagcccggccctcacccacgtcgtccacaatggtggcctgggccgcctggccatagagatcgacgacagcatagacgcccgggggcacgttccaggcagcagggccctgagtcatcccattgacaaagaagtggagagtcccgtcctcccgccgtaccacgcccaccgtgtcccctgccttggaagaagggggtgctggagtgaggagtcaggcagagttcctgccggggctggtcctgcatcagccccgcggtgtttgtgatgcccgctgcggccgccaggcggcgcacccactttcccaccttgaggcggtccagattgtgcccgtattcatccaggatggtcgtcccattgtgcatcaccccattcccagtcatcatccaggtccctgggaggacaaggagcaggaggggacatgaggggaaatgcagggctcctctccttgccacagcagcgcccacaggactcccgagcccacagtccaccttgccttttctttgatgactagatttcttccctgagcaggacaagaaaactctgcagcttccaagacagccacagccctgcccacgggacactctctagccactgaatgagtggtcacaagagtgacaagtgaaaaaggagctgcagaacaagtgccagggctttggggatagcttccccccaaaaccctatcctgtccctgcccttcctgggagctcaccagagcgcaagttggtcatggtggagggcaactggaggtaggcagggttgtgggtggtgacaccaatttcaatggagccagcccatttgtccaccatcttgtcgatgcgcacctggaacacctctccatcccgcagggctctgctgctcagcaccacgccgtgattgaagtcatcggtggcactgagggcacagcaagtggagagtcagatccccaacacacgctctcaatgtgccaaggcttagcccagcaatgcctgccaacactcactgccccaagccaaagaactaaagctcaacctccaggaagctgcccccgccaggctccctctgccttccacttccttgccccgcccccccccccccattagaatcccttcttcaggcttctccccaccccatgggccatactggggcctcagggcagtgcgtccctcgtgggtgatggctgccttctgcccacagttggggtggaagagcaggcgctcaggttctgcctgggcggcaggggcagcacggcggagagcaccctcgggggacagcgcccgcaggatggcgttgtttcggcggagacggtcactgtggttgttattgtggacgatggtcaccttcactgccatcccgtacaagtccaccacaccatacaccactgggggcgtcaagggggttgccactcctgtggcaggaaggtacgggggtgtgggagtggacagggagaatgaggggagaaagtcaaacacagggaggccaagcaccaaagagaagcaggaggatgaggtacagcccccagtcccagccccaccgaaagccccggcccagaggctctctctgggcggcccttaccctgatcgataccattaatgaagaagtgtagggcagagttggacttccttgtgaggccaatgtggtcaccctcctaatcaaagaagacaaacagtttagaggagtcctgaggcctgctcagcaccccactccacacaggaacaactccagaaggtattcgtgagagtctcagaccaccctggaggacaggtcctgggtccttgttttccagacatgacaatttccacatttcgtcaatgctccacgtgagtcaggcactgagttaaaccacctcacagacattagcttctacaagtctcagcctatggaataagtactactcgtaggctcattttagagattgcaggaggtgggggagcaatcaaagaggataagcttcttgccccggttcgctactacaaatgggaaaacagtaagaggaattcaaccatctgactccaaaatctgagtgctgaactcttgggcaactcaggcttctaggaaggaacctttaggtggaagatacagggactgcctctaggtcacataggagaccctgcttggtgccctggcagggacacagagtacctgtggctctgctgaaagcggcccagggatctgtgccccaccctcacctgcaactcatccagactgaattcgcagtactcccggcgggtgcccttgccattggtcaggattccacagccgctcatcatgatggtgcctgggtgatagtggacacttgggttcgggtacggggcttccttcccctcagcaacaccaggcctgcacccccgcccctgcccggggctggtacctgactggaggttggtcatggtggctgggtactccaaactgttggggttgtgggtggtgaccccaatctcaatggagcctgaccacttatcaacaagcttgtcgatacggatctggcattgagggacagaagggagaagcagggaatgtaaatgcagaaagggaccttcagcccttggttcttccccagggcccaccctcctagcaccaagggtcaatccccatctttagctcccagggataaggcgccaaccagaccacaggactttgcacacctcaaacatctcattgtcccgaagggggcgattggtcatgacaaccccattgttgaattcatccaggggccgccggcgctcagccgtcttattattgttgctgagtttgatgagggtcccgcacttttcatgaaagagcagggcatcgttggaagtgagaatgggcgaggtggcagcaccgctagatcccaggccttcccctgccggtggggagctcaggttcacattcaggagccctccattgtaggcagacaggatggtgttgctcaccacctcagacagctccatgttggcaaagtctatagcagcaggatggaagaaggaagctcggaagttgggatgaggctctacacccccagacctggtgcctctctccctaccccttctcctgagggccctcccttgtccacctcacttcccactccccttcccagggcctccccaaagccctcaccattatgcgactcaaggctgttaggaaacgtctccggccgggcctgcgctggggacaccatgaaggctggggaccaggtgggatgggaggggaataagggttcagtccctgcttcacggcccatagccaggagaaccccccatcctctagctcctgctctcccattcaacagacttggggatcagggtggccctgcccacacccagcctgtcttgtcactctatttcccccattccgtccccaccccaccaccactgccctagctgtgttctcaccttcatctgcagaggtcccctgttcagccaaggcagagtcttcagtgggggccaagggctcgaggggaggtgtggggatgggagtaggggggctgaagcctggctcagggggtagcacggtgatctgggtgcacttgccataaaggtccacgacggcccagacacgagggggcaggcctgtggcagccacaccgcaatcccgcccattcacccagagccgaagctccccagcaactgtgcgctccacgcccacgcggtccccttcaccaagctggtccaggtcctgaccatactcctccaacacagagcgtccatctctcagcacagagcagcccgacactacccacgagccccccttcaggcccgtggcactgcttggaaagtccagcacactggggtccagcgctgtcaccccaatctcaatggagccgctccaggagttgacctgggataggggtattggacagaggcttagaatgggccaccccccattccacaggccaccatatcttcccacctctcagacagctagctggctttctgtctcttggaacactaatccagagatgcagacagtgattttctggactccgtcttggtaattatttgggctttcctttagcaactctgctctctactcagtgtttactaaaccactcctttccaagccaagcacaaattccttggttccaacctcctgcctcctctaactttccttgtctctatggctctccaaccatccaaattctcctacttcctatacccacacctcttgctcttgtgtatcattcattcctttcccctggcctaattctctccaaagatcaggctctacccagattcaatctccttccaagttctttttctgtgagcctggcctcttcactgaatcacacacacctccctcaccctggatctttctcctcacctatctttctggcacagcctctgtccttcaatggtttgttctgtttttttgagacggagtctcactcactctattgcccaggctggagtgcaatggcatgatctcagctcactgcaacctctgcctcccgggttcaagccattctcctgcctcagcctccagagtagctgggattacaggcgcacgccaccatgcctggccaatttttgtatttttagtaaagacggggtttcaccacgttcaccaggctggtctcaaacccctgactctagtgatccgcccgcctcggactcccaaagtgctgggattacgtttgttcgttccttggcatctttcttcacttgccatcacatctctgacatctctccatcctccatgcccaagaaattgtaccaggaggtctgttcccagccattctagtgggttagccctcgtgtcccttccctggttctggatcttgagaaaactcaagctcttaatgtcatcttcaaactcaatgtttctgcttcatgctgtcttcctgaccgccccctggtgctctatggtctttctgttccctctcggtgcccggcaatgtgggctaccctggctgtcctaccccgtctccctctagacgcctcccaccaccctccacatctctgttccgcggtaccagcgctgcaccttgcggtcgatgcggacggtgaagacgcgtccatcgcgcaagggttctcggctcaacaccagcccgtggttaaactcctggcccggctgctgccgccgcgccgtacgcccacaggccgacaggctcaccaagcgcccagtgcgcgggtgcagttccccgccgctgcccagacccccgttggaccccggtcctgagccgctcccgctggggcccccacccccgcccggccccggtccagggcctcccccagagcccccactcccacccgaccctgccgccatctccgctgacaccggggcagcgcgacagccgcgcttggcggcaccgtggcaaccgcgtcgggcagacagtccgagggatacgaccggggggctgaggccaggtatgctttacggcactgccgggcaatgaagcagcccgcgctaggagctggggacgaccacgatgagaacagaaggacacggggtcgggagcctcgctttacggcatagcgaggtgacggagcggctccgagggggacgaagacctgggcagggagcttttgcgacagtgggagaaagacacgcccaccgcaggcatctttacgacggtggggtgctggagcccaaacactttctgctttgcgacagcggcaccgacgaccccgccctcgctagggggcggtgacaccttgaagcactcgctttacggcaagagggggtgtctcccctcgggatgcaggctccaaagcagcgtgagccgagtctggaggacccagagaagcggtagtgaaagtctcttcccgccacccgactgaggacgaagtgtcttgcaacagtgcggcagtccttccactttgcctcacacctcttctgattggctgagctagccgactggcgggggtgggggaagctcgctgatagttcaagtcaagcccagcttcaactccaactcaaccaaactattccatgttaagaccacaaagagtctaaagaagtcccgacaggccgtttcaagcgacagcgttgatgaccccaaaagatctcccttagagctattaacaagccccctgcccaactccccgaagctcaagctcaggctggaggaccgtgaggtcacagtcgaagctcctggcctggccccctgactgggattggctggtttggatgagggtggtgatggagaagggcgggaacaaattgcccagacaaagaaaatctttgggtgggacacaaaggaaaggggcgagcggagggacccccagcccgagtctctatatagtcttgattccgcccgccgcagctctggagcaggggagaagtggacccgggactgagcccgagcatccccggccggcagcggtgggggcggggccaggggcggggctacgtggagccgggaggcgggtcaggatcgctgagagcagccccccagtggggccatggagaaggtggagtccctaggggctgctggcggcctcaaccgggattcccctggaggggcagccagaggagtgcccgcagcggtcacaggagtcgaggcaggcgctgggcagccctccagagtagtcttgtttcacggttctgggccccacgtgcactcagggggctccgtaactcatagtactggttcaagctgtccctccggggggatagtggtccttggttccgggcccagtcagcacccaagggaggctgcgaaccacagccttgggtctggcaggaaccctggtggattcaacatccccgggcctcgaaccagtgtatccagggcttccagccccgggcctgggggacctgcagggcaagaggtaaacagccccgggtgcagtccgcactctgggccaacttgcttgaacccccaaaactcccaacaggaccggccccggagcatcctacgaaagaacagctccaacttgatgcagaaatcccccaatgtggagaagtaaggagcccagctctgcgggcagccagcccagagtcgggagggttcaggacacctgagggtgggagccagaaggaaaggggcagagccttaagaatgaagagttagagtaggtgagggcaattgagtgggaagtccgaggttccaggctttcgggagaagagcaggtgccccataaaccgtggctgcacaggactgtgattatcattaagtctgaccccatccccagcctcaacaaggtataagaaacctgttttgagtcggagtggtgactcatgcctgtaatcctagcactttgggaggccgaggtgggcagatcacctgaggtcaggagttcgagaccagcccggccaacatggtgaaaccctgtccctactaaaaatacaaaaataagccgggtgtggtggcaggcacctgtaatcccagctacttgggaggctaaggcaggagaatggcttgaaccggggaggcagaggttgcaatgagctgagatcacaccattgcactccagtctggaaaacagagcaagactccatctcaaaaaacaaacaaacaacaacaaaaactgttttgaatgccacgcagggtagctcatgcctgtaatcccagcactttgggagtgcgaggcaggcagatcacgaggtcaggagttcaagaccagcctgaccaacatggtgaaaccccatctctactaaaaatacaaaaattagccaggtgtggtggcgcacgcctgtaatcccagctactcaggaggctgaggcaggagaatcacttgaacccgggaggcagaggttgccgtgagctgtgatcgtgccactgcactccagcttggtcaacagagccaagattccatctcaaaacaaaaacaaaagcaaaaaacaaaaacaaaaacaaaaaaaacctgttttgaatgactgggaaaatgagggaggcctatgggggggtcattagaaggtctcctcccccagccccagaaggaagtctcagcactgggacgagatgaatatcctggccacctaccgccctgctgacaaggactatggatttatgatggtggatgagcccaacactccctaccacaggtgctgagccctcagccccaacccttcagtccagagattcttctctatttaaaggaggggacaggtggaggaggcagagcgcctcagggactggatactgcctgacacccacctcccggcactgcttccccctcctctgcaggctgcaggacagttttgaggacctctctgccggctcctcctgctcagtgaatcctggagtgctggcagagaggtaagagtcctgccagagatcagccgggttatggggcctcttccttccctcagccctgaattcaggtctgcagcgggtctgctttctgacacctgcagtgggaggtgctacaatttccatcaggcctggatgggggcaggggtccgccaatttggcctcgtttaccacctgtccccattgctattttcttctcttgatgcccccaactagtctcctgccccttcaggattgccatgatggacagtatctgccccaggttccgccaggactgtgctgacaggagctcagggcctgcagacaacttttccaagatacatgatgtagggtccagccctatggggcttagcgggtgttccccaccgtgtgcagagacgagagattgtaataaattaagacacaagacaaagagataaagagaaagcagctgggcctgggggatgactaccaagacgcggagaccggtagtggccctgaaccactggttgcgctgatatttattgcatacaagacaagggggcagggtaaggagggtgaatcttctaagtgattgacaaggtgcagcaagtcacgtgatcacaggacagggggcccttcccttttaggtagccgaagtagagagagaaggcagcatacgtcagcgttttcttctatgcactgataagaaagatcaaagacattaagactttcactatttcttctactgctctctactacgaatttcaaagaggaaccaggagtacgggaggaacatgaaagtggacaaggagcgtgagcattgaagcacagcaccacagggaggggtttaggcctccggatgactgcggggaggcctggataatatccagccttccacaagaagctggtggagcagagtgttccctgactcctccaaggaaaggagactccctttcgcgatctgctaagtaacgggtgtcttcccaggcactagcgttaccgcttgaccaaggagccctcaagcggcccttatgcgagcgtgacagaaggttcacctcttgccttctaggtcacttctcacaatgtcccttcagcacctgaccctatacccgccggttattcctaggttatattagtaatgcaacaaacagtaatattaaaagctaatgattaataatgtctataataatgattgataattgtccatgatcatctctatatctaatttgtattatgactattcttattctaactatttctttattatactgaaacagtttgtgccttcagtctcttaccttggcacctaggtaatctttcgcccacaacatgagatgagggttgtggattgaatggaaagggggaggtggagcgagcctttggcaagagtgcggtgggaaagccaagctctcaccatggtcacagactccaccgactttgacaagcgccgcaaggcacactatgacaaagggaagtttctcaaggctcagaaaaaccagcccttggagaatgaagaggatgaggatgacaatggtggtattatcagtatcagcggtggcagtcaaggcgtgatgctggacccagagcccaggcctgtgcagagaggcttggcaggagaactagccagaggagccaaagatgagccaggcctggtcacctggaggcacatccttgaagccgagggttagcgatggcggggctccagggactagagggggttgtattccagagcccgttcctcacttctctaccacagtctgtcttcctcagtggctatcagcccaagactctgctgcctgacagggaggtaatgctgggaagtaaccccagggaagaaagagggcagctggaggaaggaccccactcaggatagtccccggagattattggctgttgaggaacagaaagtctgattgggggctgatttgttggccaggcccagtggctcacttctgtaatcccagcactttgggaggattgcttgaggccagaagttcaaaaccagcctgggcaacgtagggagacctcatctctacaaaaaaagaaaaagaaaaaaattgtttttaattagccaggtgtggtggcgtgcacctgtagtccaggctactggggaggctaaggtgggaggatagcttgagcccaggagtttgaggctgccgtgagcgatgatggcactaacacattccagcctgggtaacatagcaagatcttgtctcaaaaaataaataaaaaaataaacaaaagtccgagacaaccatggggggaggtggagcggtcactgaagtttttctaaaatgggaagggtaagagaagtcagtgagatgaggatctggggcctgagcttctcccctctggtgagggcccacaacagacacctgggaggcatggatacaccagatggctagaagacttggattcatttgattgattcctcagattcctccacctacagaaatcagtccccccagctgtggccactatcatattggggcaggagattgctctgcagcacaaggaatatgatggcaaaggactatacctgaggtcctgctcccacccagagcttgtagaggacgtggaagatgagcatcaggatggtgagaacctgggcaggccagcctagggggcaggagggctgggaatgcacagcctgatgggtacccgagccctgatccctgattctaggctccacaagcttgacctaggtgattgagaaccccgtaagcactgaagtccacctactggaccacatgggaggcccctttagggatcacaaggccacggagagctccctgatggcaacaatgacaacattgcagcctgttgagggcaccaggccaccatctccctggggctgtctcttggcaagctcccatctcccagccctccaattctttcaggccagtacatcagcaacaggtggaaggagaggccctgaacagcctcaagtccaaggtccacattggacaggcgaggaaccagggagactcagaggcggttgggaccccctccagcttggcaccacacactggctccatgcctcctccttcactcctctgccacaccaccccactccaggtatttctctgtcctccaaagacagtgagtctcaagtggtgtccagctggtggctggggggctgagctggcaaagcccaaggagttcagagagggagagtggaagcaaccccaactcctcaagccagaacaagcacagcctggcacactgagcctgggcagaggcaaggggatgcatacactggccagggaggtagaggagctgagtggggaggttctaggggatccagagtcacatggacaagatctcatgcctgctacgagaaagccatgaactcaaactcttctctccagatgaaaccctgggacttcaatggactcaagaaaaggaaagcaaacaatggaaaatggggctggttgggggcggagtgggggcaaccttcccttcatgaccaccctatgaatagaaataaagagcagaagagcaagagtctgggagctgtgaatcgggtgctcaggctgggcctgctcagtcgttgaggagaggggaggaggaaggggagttcacacacaggaaccatgaatatgacggcaaaacgaagaaagctgggagcagtccggggtactggactccacaggagcaggcccaagctgtagcaggatgacaatgactgatgcaattaatatagtgaaccagctgggcacagtggctcacgcctgtaatcctagcactttgggaggccgaggtgggtggatcacctgaggtcaggaggtcgagacaagtctgaccaacaaggtgaaaccccgtccctactgaaaatacaaaaagttagccgggcatgatggcaggagcctgtagtcccagctactcgggaggctgagacaggagaattgcttgaacccaggaggcggaggttgtagtgagccgacatcgcgccactgcactgcagcctgggcgatggagggagactccgtctcataaataaataaatttagtgaaccatgaatttactgctatcaccttcttcacttcgtacagccctggaggaaggggttatcattcccatcttccagatgagaaaactgaggaatcagagagctcgtccaggggcacataacctctaagtgacagagccaggatttgaacctagatctgccaggcccccaagataaccacgaagagagaaagaaacagaggctagagccccaggaggaaggagctggcagatcgtctctgagggtggggctgtggcttctctgatctcaggcccccatcctccgcccaggccccgcccctgcccctcccagcactgcctggaagtgtggggtgagagctcctcctaggacacccctttccccttggggaaagaattgtgcccccaggcccttccccgcggaggtccctctcctccttccccctcatctccccttcctgggacagaaagtgcctccacctgcatccccaggggcccggcctccagggcccgctggccccacagcaggcaagctgagatgacggtcaagctggatttcgaggagtgtctcaaggactcaccccgtttccggtaagtgtgaactggtctggggggctaaggaggggaaagtctaacacccccagcacacacacacctttccccaggccaggtctccttccagggagcaggcctctaagaggcaggagcgagcctgtgggccaaagtggtaccccagctgtgaaagcagggtactccaatgctctctgcccctgcatgctcctcctggcctctgcagtttccctcacccctagagctggcattccctctggcctctcagtgggacccctgcccctcccccagcacctgctctggggcggttagcaacttcctgccctggccacatccaccctccttctacccttcctgctctggcctgggctgtggtagctcccagactgcagagcgggcagagcacaagtaggtgggtggggggcgagcctctcaactctgcagctttctcctccgtacccaccgccctgcgactccatcccgcctgatgaggcagacagaccagatggacccaagctctcttcccatgaccccctctttcccagagcctctattgagctggtggaagccgaagtgtcagaattggagacccgtctggaaaaggtgaccctgacatggagaggtgacccaggagtggattaggttgagaggggtagggccagggagaaagctggagacacagaatgcatcccagggattattgaatactgtgtaggggagatattttggagactgcagagaagcaaaaaaggtggttctgtaccgacaagaagctcaggatcttggaaaacaagacttacttttgggccaggcatggtagctcatgcctgtaatcccagcactttgggaggccaaggtgaatggatcacctgaggtcaggagttctagaccagcctggctaacatggcgaaaccccatctctactaaaaatgcaaaaatcatccaggcttagtggcacccatctgtagctccagctactcaagaggctgaggcagaggaatcacttgaacctgggaggcggaggttgcagtgagccaagatcgcaccactgcactccaggctaggcgacagagcgagactctgtgtcaaaaaaaaaaagacttaattttggacttccttgttctgctcttgagctcctgcattgtgccaggccctgggcattcagggaggacaagatcatttctgctcccacggagcccaaaggctgactagaagacaaaccagtgaaacgtttcaattcaagacagtaaggtgtcccctgagcactctatcaaacagcatgttcacacaaatacacactcaaatgctctctcattccccttacttcgctttacttttctctgcaacatttacctctgacacattatgtatttgcttgctatatattagttctctattgctgtgtaacaaattgtcacaaatttagtgggcaacattgttttatgggcaacatggtgagacctcatctctacaaataataattttatttttatttttatttatttgagatggagtctcgctctgtcacccaggctggagtgcagtggtgcgatctcggcttactggaacctccacctcccaggttcaagtgattctcctacctcagcctcccaagtagctgggattacaggtgtgcaccaccacacctggataattttttttctttttgtatttttagtaaagacagggtctcaccatgttggctaagctggtcttgaactcctgacctcaaatgatctacctgccgcagcctcccaaagtgctggcattacaggcttaagccaccgcacccggcctacaaataataattttaaacaatggactggatggagtggccacagctgtgatcccagatgcttcaatactgggctcaagtgatcctccctcctcaacctccccagtagctgtgctacaggcacatgccaccacgcctggcttttttaaatttaaatttattttttgtagagatggggtctccctatgttacctaggctggtctggaactcctggcctcaagtaatcctcccacctcagcctcccaaagtgctggaattacaggtgtgagccaccacacctggcctgaattttttattttgagtaaattattgactcaggagactagtgaggagaggtctcatgtacccatcacccagcttcccccagtggtgacatcttatacaatactagtacattattaaaaccaggacattaatagtgtcacattacaattaacaataaactcggccaggtgtggtggctcacgcctgtaatcccagcactttgggaggccaaggtgggcggatcacgaggtcaggagatcgaaaccatcctggctaacactgtgaaaccccgtctctactaaaaatacaaaaaattattcgggtgtggcggcaggcgcctgtagtcccagctactcaggaggctgaggcaggagaatggcgcgaacccgggaggtggagcttgcagtgagtggaggtcgtgccactgcactccagcctgggcgacagagtgagactgtctcaataaacaaaaacaaacaaacaaaaaaccccaataaactctagccaagctcagtggctcacgcctgtaatcccagcactttggtaggctgcggcaggtggatcacgaggtcaggacttcgagaacagcctgaccaacatgatgaaacccccatctctactaaaaatacaaaaattagccaggcgtggtggcacgcacctgtaatcccagctactcaggaggctgaggcaggagaattgcttgaacccaggaggcggaggttgcagtgagccgagatcacgccaccacactccagcctgcggaggtcgcaatgagccgagatcgtgccactgcactccggcgtgggcgacagaccaagactctgtctctaaataaataaataaactctatagatcctactttgattttacattttgcatatactcttttttggtgtttttgtgtataattctatggtactttatcacgtgtatggattcctttaaccatcaccacacaccaatggacacaaggaattcctttacagtggtacccgacacccttcccacacttctttaatctgtggtaaccgctgatttgttctccatctctctacttttgtcatttccagaatgttccatatatagaatcatacactatgtgaccctttgagatttggcttccccctcccccctcactcagaataatgctgctgccgggtgtggtcgctcatgcctgtcatcccaactactcaggaggtcaaggtaggagggttgcttgaggccagaagctcgagaccagcctgggcaacatagcaagacccttgtctctaaataatgttctgttttgtttttaaattagccaggcatggtggtgtgtgcctgtagtctcagctactcaggaagctaagattggaggatcccttgaacccaggagttcaaggctgcagtgagctatgatcccaccactgcactccagcctgggcgacagagacctcaactctaaaaataatcataattttttaaaagatgaatgctcttgaagtttatccaagttgttgcacatatcaacagtttgttcctttttattgctgagtactgttctattgaacagatgtcccagtctgtcactagtccagtgttatgaaagtttcttactcatctaagggggaggggctgagatggtaaggaaaaaaactagacacagagtcctcagattcacacagtgatttgtgaacatccttgtaccttgtcacagacaacccatggtgatgtctgataagatttgatctcggtcaggccaggtgcagtggctcatgcctgtaatcccagcacttcgggaggccgaagcaggtggatcacctgaagtcaggagttcgagaccagcctggtcaacatggtgaaaccccgtctctactaaaaatacaaaaaattagctgggcgtggtggcgggcacctgtaatcccagctactctggaggctgaggcaggaggatcgcttgaacctgggaggtggaggttgtggtgagccaagatcatgccattgcactccagcttgggcaacggagcaaaactccgtctcaaaaatagaaaaataaaaagagatggggtttcactatgttggtcaggctgatatccaactcctgacctcaggtgatccacccacctcagcctcccaaagtgttgagattacaggtctgagccaccttgcctggcctatcaagtctctttgtcagtcaaaagagccagataggatgggccccaggagtaccccggcatttcctcttggccctgacccgtggtctagatgatggattaatatttatgagggaacgtgcagtgagcacagaatgggacaactcctagcagtaaatactatagattttatttatttatttatttttcgagacagagtctcggtctgtcacccaggctggagtgcagtagcgccatctcggctcactgcagccttgacctcccggattcaggcagtcctcctgccttagccccccaggtaactgggattataggcacttggtgccatctcagctcactacagcctcagcctcccgggttcaagcagtcctcctgccttagcctcccaagtagctgggattacaggcatgtgccaccatgcctggctaatttttgaatttttagtagagatgaggtttcaccatgttgcccaggctgctcttgaattcctgagctcaagcgactggcccgccttggcctcccaaagggttgggattacaggtgtgagccaccacgcccggccaatactgtagaatttaatagcaaccaggtagagcatccagaccatgcaggaatctccacggagctctggatctaagcaggtaggcagggcaggaagagatatgtgcgagtggacagggaaagatgttttggaggtaaggctgacagaggtgttggcgacaggctgagaggaatgggcaggaattgggtttcaggcccaaggcagtgggagcaaagacgcagcgataagaacacagcaggtatgtgttagatacagggagagctggatgagcctggagggcagtgaggccaggcaggaataggggagcgccgccctgggcaaggggagaggaagtggggcaggtgtgggggcatcaccaggtgtgaggatgatggcacagctccctgttaccctccttctttcccagctcctgaaactgggcactggtctcctggaaagtgggcgccattaccttgctgccagccgcgccttcgttgtcggcatttgtgacctggcccgcctgggtccaccagagcccatgatggcggtatgcggagggtctgcatctgggagggaaggggtctgggatgaggaggtgatgctgtggaagaggagggctggcctggggtctgcaggttccaggccacagcagggctgggctgctgtccatgacagccgtagcaggctgggtctcgagtcgggagggtgctgccaccccatgcctggtactctttctgtgcctcttcttgcctaggagtgtctggaaaaattcaccgtgagcctgaaccacaagctggacagccatgcggtaagtaggggaaggtaaggattgtcggggtggtggccaggtcacctgtggtcctgaccccagtctaccaacttctccttccctcaggagcttctagatgccacccaacacacactgcagcagcagatccagaccctggtcaaggagtgagatggggccgggcgcagtggctcatgcctgtaatcccaacactttggaaggccaaggcgggaggattgcttgagcccaggagttggacaccaacctagccaacatggcgaaactgtctccacaaaaaatacaaaaattaggccgggcacggtggctcatgcctatgatcccggcattttgggaggccaaggcgggcggatcacctgaggtcgggagttcgagaccagcctgtctaacatggcaaaaccccagctctactaaaaaatacgaaaaaaaaaaattagccgggcatggtggcaggtgcctgtaatcccagctactcaggaggccgaggcaggagaatcatttgaacccaggaggtggaggttgcagtgagccaagatcgcactacttcacttcagcctgggcaacagagtgagactctgcctcaaaaaaaaaaaaaaaaaaaaaaaaatagccgggcgtggtggcacatgtctgttgtcccagcttcttgggaggctgaggcaggagaattgcttgagcctggaggtcagggctgcggtgagccatgattgtgccactgtactccagcctgggtaacagagcaagacccggtctcaaaaacaaaaacaacaacaacaacaaaaattttttaaagggggagtgagatgggagagaagggggccttatttctcggaaaccagccctgctgccctcttcccatggccacaggagcctccccagtgacggagttgtgagattgggggtttctggtgtcctgacttccgtcccagggatcaccttgggtttcccacgttgcagagactaactgaaaggacatgagggctttaccctgggaatgctctgctggggcaggtgggtgttagctgcgattctgtgttattttcccatcctcagaggtctgcggggtttccgagaggctcgccgggatttctggcggggggctgagagcctggaggctgccctgacccacaacgcagaggttcccaggcgccgggcccaggaggcagaagaggcaggagctgctttgaggacggctcgagctgggtaccggggacgggcactggattatgccctgcaggtgcctgccccaatctgtcttcctggggtaccagagcctcaagtgtcacctcgaggcttgggggtctccagtgtgcagtgggaaggggtgctgtgtcttcaagactgatctggggttttttacgtcctcttttacgtcctcagatcaacgtgattgaggacaagaggaagtttgacatcatggagtttgtgagttgtggcgggggtgagggcagggtggagaagagcctgctgccagcacaagggaatggggagaggggttcttcctcagccttcccactgcccgccttgtcccccaggtgctgcgtttggtggaggcccaggctacccatttccagcagggccatgaggagctgagccggctgtcccagtatcgaaaggagctgggcgcccaggtggggccccagggcacagcaggtggtagagggaggttagggactcctaactggggggccttggacatctgagatgcccttcctgtgcccagttgcaccagctggtcttgaattcagcacgagagaagagggacatggagcagagacacgtgctgctgaaacagaaggtgaggggccaggtgcggtggcccacgaccgtcatcccaacatgttgggaggctgaggtgggaagattgcttgaggcctggagttcaagattagcctaggcatcgtagtgaaactccatctctacagaaaattttaaaattagctggtgtggtggcatgcacctctagttctagctactcaggaggctgaggtgggaggattgcttgagcccaggagttcaagactgcagtgagctatgatcacacaactgcacttaagcctgggtgaaagaacaagaccctgtctctaaaaataaattttaaaaagtatttcaaaaagcagaaagtaagggctagggctgtgggcaggaggcagatgcctatggccttggtgtctgcccatctcagttgccctttgatcctcttgtgcctccaggagctgggtggggaggagccagaaccaagcttaagagaggggcctggtggcctggtgatggaaggacatctcttcaaacgggccagcaacgcatttaagacctggagcaggtgaggagaggacacccccaatcagcccgccccacccaatgatgtattttcgagtggtaatagcacactaagcactgcaaggaaaaacagacgaacccccctgcctcagtagagtttcattccatcagcaaagacagaggataaacctagtatgtaaattacgtgctatgttagaaggtgatagtgcttgctataggagaaagatgataaagcaagggatgtggggagctgggtaggggttacagttctaaatagttgggcagtgtgggcttcatgagaaggtaacttttgaacaaagacttgaaggatatctgggggaagaaagttctagacagaagaaagagccagtgccaaggccctgagatagctggggagttggaagagcagggtggtggccctgggtctggacagagtgagggaggaggatgtgcaggagatgaaatcggagctaatgggggcatgagtcattatagggccctatagatttttgtagggatttggggtctactctgagagcaattgggagccgctatagggtttggaacaggatggtggcatgctgtgacttgactcctttcccttctagggccactgctagcccacatgggatctctgtacaaattagaaaatggagctgcttccccaagatactcttttttctttttcttttctttttttttttctgttttttttgagatggggtgtcactctgttgcccagcctgcagtgcagtggcgcagtctcggctcactgcaacctctatcccctgagttcaagtgatcctccctcctcagcatcctaaatagctgggaccacaggcgtgtgccatcacgctcggctaatttttgtatttttggtagaaacagggtttcaccatgttgcccaggctggttgcaaactcctgacatcaagcaatccacccgcctcggcctcccaacttgctgggattacaggcgtgagccactgtacctggcccccaagattctttcttttctttttttctttttctttttttttcttttttgatggagcctcgctatgttgcgcaggctgcagcacagtggtgcgatctcagctcactgcaacctcagcttcctgggttcaagcgattctcctgcctcagcctcccaagtaggtgggattatagccgcctgccaccacgcctggctaatttttgtatttttagtagagacggagtttcaccatattggtcagggtggtctcaaactcctgacctcgggtgatccaccacccccatcagcctcccaaagtgctgggattacaggtgtgagcccagcctaaatagtattttttaaattgtagcaatagacattttattagaaaaagaattttactgccatctgctggaaagttgtcttcataactatatgaaatctgggttgtccaagataggaatagcatcctttagatgttccaatctgcacaattgtccacccttctctggaatgtctcgtggaacagtcagcccaggtgtctgtcctctcagtaagatcctcatgggcaaaaagcacagcctctcttccgtccctcatcctaaagctgcctatgtctgtaatgatttccttctcttacagacgctggttcaccattcagagcaaccaactggtttaccagaagaagtacaaggtgagtggacctgggtcctggatgcctgggccccagggagactcagctcttgcctgcagctggacatctggccccttatcaccttatcctgccaggaccctgtgactgtggtggtggatgaccttcgtctctgcacagtgaaactctgccctgactcagaaaggcggttctgctttgaggtggtgtccaccagcaagtgagtgcaatccccaggggtgatactctaatatatctaaacaactgccaatctgaaaggcagggcccaccacaatggaggccccccatgcagctccagactttaatttaattctttggcggctggactggggggccattgtggaagagggtacagggtgatgggggatatttaggagaatattaccaactggtacagaagtctttcaatgcaactggaactggttgaatactggctgaatgtcagtctgcccatgctgccactttgcttcccaggcctcagacccctctgccatctccctcaccctcctacctaggtcctgcctcctccaggctgactcagagcgcctcctgcagctgtgggtcagtgctgtgcagagcagcattgcttctgccttcagtcaggctcgccttgatgacagcccccggggtccaggccaggtaccttaacctgggggtgcggagccaggctgcctgtggagatggggcaccctttaccctaggccccttggccaccctttcttcccctctctcccccagggctcaggacacctggccataggctctgctgccaccctgggctctggtggaatggccaggggaagggagcctgggggagtcgggcacgtggtggcccaggtccagagtgtggatggcaatgcccagtgctgcgactgccgggagccagccccggagtgggccagcatcaaccttggtgtcaccctctgcattcagtgttccggcatccacaggttactccacaaggcccatgcgggagccccactccttcgggccacagtgcggctccaatacagagcgcatcacaccggcccctcttccttccctgtcctggcttcctctcttagcttctggctttgtcactgggtaccaggcctgggcccaagcctctggggtgccagttggacccaggcgggcctagcccctctgtgtcctagtctggccagaattgggggatacccagaatttgttggcttggttggaagaagtgtggggtcaaggctgctgagggtgggggagccagtgaagactaggcagagaaacggtcatgaggccttagcaagtatctaaggccctcgccccccacctcagtgtggtggaagggaggtgacatgggagaggttgtccaggccaaagtgtcacaagtgtcactagagaagggaggtggctggagtgatgagggccttgaaatgaaacctaaggaagaaggaatggtgacgaggcagagtcctgccagggccaggtcaaggctacatggcggttacatggccgcagctgccctgcctcctgggccagcacctctgcacgggcccccatgccagccttgcctcccagtgtcttcaggagcagcagcagctccccaggccactgcccccctgcacagggcctgaccctccccctctggccctccaggagccttggtgttcacttctccaaagtccggtctctgacccttgactcatgggagccagaactagtgaaggtaacttagcgtattgtgaagattgggggcaagaacttggggtggggcaaggacatggcggtgcaggggcgtgatccctgaggagtcactcacccccaccttccctgtctctgcctctgcctgggcctcctgaagctcatgtgtgagctgggaaatgtcatcatcaaccagatctatgaggcccgcgtggaggccatggcagtgaagaaaccagggcccagctgctcccggtgagcttggggtttagcctcccaggggaatgggggacccctggagcagaagagggaagactgcgtgcttctcccctcccacaggcaggagaaggaggcctggattcacgctaaatacgtggagaagaagttcctgaccaagctgcctgagattcgagggcgaagaggtggccgggggcgcccaagggggcagcctcctgtgcccccaaagccttccatcaggccccggccagggagcttgagatccaagccaggtatagggttggttgggcattcattgagcatctgctgtgtgctcggcatcgtgccaggtagcgccgggaggcacagagtgtgaagcccaggccttccgctggacaatgtcggagggaccggactgccgtttcaggggttacggtggagtgtgacattaagaatgagaaggaatgtggggctgggcgtgggcagggagggtaaggggtgccaacagcacaagaaaaggagagagagagggggtgggtttggctggagcgtcaggggttgagagctgaggccaagtgtggttggaccagatgaggtgatgatgccgtctctcccccacaccctagggactcgtacacatgcatacgcatacttacacatacccacacttgcatcactctattccctccacagtcccaagctccccatcatttagaagagacctgtcccattatagcattgggacactgctgagggttttcttcccagactcggagctgcttccccctaacagaaccaaatcccccgaacagagcccccctctgaggacctgggaagcctgcaccctggggccctactgtttcgagcgtctgggcatcctccatctcttcccaccatggctgatgcccttgcccatggagctgatgtcaactgggtcaatgggggccaagataatgccacaccgctgatccaggccacagctgctgtaagagccctgctgacctctccaccccaccctagggctctgacacctactcctgactctgggccctgcccttacctcctttccccaccacctgttccctagggcttccacccatagggagagatcaacaatagagactggttgctaagagtgtgtgatttggaggcagagaacctgagtttgaacccaggctctcacctcttacaggagacttttttttttttttttgagacagtctcgctctgtcccccaggctggagtgcaatggtgcgatctcggctcactgcaagctccgcctcccgggttcacaccattctcctgcctcagctgcctgagtagctgggactacaggcgccagccagcatgcccggctaattttttgtattgttagtagagatagggtttcaccgtgttagccaggatggtctggatctcctgaccttgtgatccacccgcctcggcctcccaaagtgctgggattactggcgtgagccactgtgcccggcctacaggagacttttaacaagttattaacctctcagcctcatctgtaaaatagtaacatacctcaaaagcttgtactatggatttatatatgaatacatgcaaagagctagagccaagcctagcttggttacagttagctgtaaccccttccacactcctgattaccacactccaccctcccattctctgaactggcgccaccctaagacatcttgaaatccaccactagggatgccaccctcaaccccccttctcgacttctccatgcagaattctcttctggcctgtgagtttctcctccagaacggggcgaacgtgaaccaagcggacagtgcgggccggggcccgctgcaccacgcaaccattcttggccacacggggtagggatgatggcatggggaggaaggctgggagaagttgggcggccggctgaccctggctcttctctccaggctcgcctgcctgttcctgaaacggggagctgatctgggggctcgagactctgaaggcagggaccctctgaccatcgccatggaaacagccaacgctgacatcgtcaccctgtaagaatgcctgaaggggcggggctggcgctgggactccccccacccccgcccacccacgttcgggcgggcgggcggggctgacgccgaaacagaagcctgtgctgtggggcctcggaaaggggctgggccagcgccggggccaggctcgagaaaggctgcgcgaagtgtgcactgggacgtggagtagaaggcaggcgggagggcgggcagggtgcaaggatgcttggcccaccctgagaggcgtaattcgcccatcaacattgctgtcaggcatctttttagcactagacgtgaccccgggggtgggggcagatgaacggaacgcaacccagctcaaaggatgggaagttgtgggggaggtgaggatagtctttttttttttttttgagacggagtctcactctgtcgcccaggctagagtgcaggggcgcgatctcggctcactgcaacccccgcctcccgggttcaagcgattctcctgtctcagcctcccctgagtagctgggactacaggcgtgcgccaccacccccggctaattttttgtatttttagtagagacggggtttcaccatgttggccaggacggtctcgatctcctgacctcgtgatccgcctgcctcggcctcccaaagtgttgggattacaggcgtgagccaccgcgcccggccaaagatagtgtcgttcatttcttaattccctcctcttcaggctacgactggcaaagatgagggaggctgaagcggcccaggggcaggcaggtaaagaatacacccaccccaccccccaggcccaacacctgaactctgggcttctggtccacggtgacctctctccctagtgcccagctgcattcattccgttatttaacaaatgcgtattgggcgcatgcgacgtgccaggccctggcaaggcataggtgctggcgcagtgcccgcggcgcgcacgttcccacccaggctcggagcgcgaggtccccaggtgggccccaaccgccggatcctgcccttctgcactggggcccagccgcctcccggcctttcctccctcccccaggagatgagacgtatcttgacatcttccgcgacttctccctcatggcgtcagacgacccggagaagctgagccgtcgcagtcatgacctccacacgctgtgacccgaggcccacggggcccgcgcctgcctcccttccccgccaccgggccctctgccattaaagcctccgtgcttcgctcttcccttctggttcacttcttgggcgccaccttcgggcccgtagggtgttgggcgctgcggctcccgaggtgcggggagcagctgggggtttgcgagctccagtccagcaaggtgcgactccggggagcgaggcggcagcttcggccgcggcctgagcgcagggcgctgcggggcgggggctctcgggctggggcgacgtggccagcccagtcctgccgaggggtggggctggccctggggctcgctggccccgcgccgccgcggagagagcgcgcccgggccaccccggctggaaggcatccccggaatgcggcggctcagcacccgccccctcgggaattccccgggggagccgctgggagggactcggctcccgggctgggccggccgggcctcgggctctgagcggtgggattagaggctccagccccgccgacttgcagacgtgagatcgggcacacctgagcggcggcggggcggtcgtggccacatccggggcgacgtgcctgagtcaccccgtcccgccagcgtctgccagtccagccagtccgcccagtctctcgcgtccgagactcgcctccagcctcccacctccgcccgggccgcgcgagcctcgcgggggcgggggcggggcgccaaggggcggggctgtctcttaaagggccccgggccgctgcccttaggccacttcctgggggcggagaggacctcagcggctgcggcgacacccagggaaggcggcgcggccgggtcccgaaactcctggctgtttccatcagagccctcggacactcccagcccgggctgagcacgcatcgtcgctccccggcggatacaagggggctccgccatccgctcccgtcagttcggcctccatctcctgggacccgcgccggcagccaggccaggcctctgagtggccccagagccctggctggactcgtccacggcggcagcgatctgcccggggtctcggaggccatcccttcagagtcggccctgtgctcgccaccgtcacctgctggttggattccggaaacccactgtctgaagaccacagaggggtgtcgctgaccaccccaaatcggatacgtccagacctcaagctcccttcccctctctggctgccctctgctcttttcatctcttctctcaaccttttggggatttctgtgtcctgacaccacctccccatccaccaccaaagtagccggggtgagccccaaaccttactgggtgtgctccacctgtgcctccaacccagcgaatctgacagcttcgacccaattctgcacacacccaggaagttctgccttttcttttctttcggtgtctcctgtacttcccaaaatttctcctcctcctgtgccctcttcgcccccctcctttgggggccccgtgaccctgaatgtggggggcacactatattccaccactttggagaccctgacccgcttcccagactctatgctgggggccatgtttagggccggcacccccatgccccccaacctcaattcccaaggaggcggccactacttcatcgaccgggatggcaaggccttccggcacatcctcaatttcctgaggctgggccgcctggacctgccccgtgggtacggagagacagcgctgctcagggcagaggctgacttctaccagatccggcccctcctggacgcgctgcgggaactggaggcctctcaggggacccctgcacccacagctgccctgctccacgcagatgtagatgtcagcccccgcctggtgcacttctctgctcgccggggaccccatcactatgagctgagctccgtccaggtggacaccttccgagccaaccttttctgcaccgactctgagtgtctaggtgctttgcgggcccgatttggtgtggccagtggggatagggcagaggggagcccacattttcatctggagtgggccccccgccccgtggaactccccgaggtggagtatgggagactggggctgcagccgctgtggactggggggccaggagagcggcgggaggtggtgggcaccccaagcttcctggaggaggtgctgcgggtggctctcgagcacggcttccgactagactctgtcttccccgaccccgaagacctgctcaactccaggtctctgcgctttgtccggcactgaggatgctgttctcagtttgactgtggggaggagagagaatggggtactagcacccctgaagcctctttccagctctgcttcaggagctatgagagtcgggactctcctgcacctgactggagctcagatgtgggcaggaattcccaaacctgagcccaccaaggactcacaagtggtccagaaggtctcaacctgtgctgaccctgggaggggtagggaaggttctctcagcttgttcttgcctaaggctgagcacctccagtctctccttgatttggagctcagtgtttaagggcttggaaaaggggggaacatctctttacccagactagacctagcaaaaccctggaaggatattgaggtctggggaaaagggaggactttgcattttcccaatgcggtctcttggaccatggcttctactcctgaagctgggtggcctggcctggcctgaccaatgagaggccagaacactctggaacatcggaagaggagttctttgctatgttccaagccatctactgagggaggcagaaaggccacaacccaccctaggttgatgtatgggagctaggacagtccccatggcaatggggctggagcatccctcatctggaagaatcccatactgatggcagggctggccagggggaagagggtagtatctgtgggtcctggcctttcttcatgtgtgcgtgcatatcagcccgtgtggctgactgatgtataggtccctggcatcctggttcatatctgtgttgctgactacagtgtctgtgatgtccgcatgtccaggcctgtttggggttgcctagcgactcttctggcacagggtgtgtctgtggtatacctgtgaggtggttgacaattagtagtttaatcacagggtgtgtgtgtgtgtgtgtgtgtgtgtgtttatgtgcacgcatgtatatgcatcaccacgtagccaggaggggcctgttggggtttgagtcactgggatcttcctggtgagaggtaagagaagtcactgggcttagctgggcctctgaggcctgtatggaactcttggttgctgaggcaaccatggacctgttgctaggagatagctggggaaggcccaaggccgcccagggcagagagaggagacgaagagtttgggacagtgggggaggagatgggaagggatgggatttctgggtcccagagcgggtgggatactcacgcacagcttcttcactggtggggggtggggcacacattatttctcactggtcatgatttacaagaagaaaaataaaactgcttttggaaccacaaacttgtgaaggctgttgagggccaggttgggggtgctgtcccctcacaacagaagccctgctttctctgcccatcgcctgctggagatgccttctggaccccagttccttgagccccagctttaccccagctgaggatgggcagtgccattgttcattgttctggaacattctagaacctccaggcaagggctggagccagggctgcagagcattcctcggctcagctggggcagcgccgccccatcccccagtggtcctcatgtggaggctggcactaggcggggttttcctggcagccgcccaggcttgtgtcttctgtcgcctcccagcccacgacttgtcaggccgcctggctcggctctgcagccagatggaggccaggcagaaggaatgtggggcctccccagacttctcggcctttgccttaggtaggaccagacatccagggatgggcccagcaagcactcacccccctacccccagagggtggcatgtgaccttccagctgtgccctccatctgtggccctttctggacatgctggcctttccctctgagagagctccatatctgggaaagtcaggagagaccccagaacctgggctgatgagggaatcgctggtccttgcccatctccacagatgaggtgtccatgaacaaagtcacagagaagactcacagagtcctgagggtcatgggtgaggtcaaggggaaagagtgacctaggggcttgggaggataccaaggagagggacgggtgacaggggttggggtgggcagggaagggtggaggggtagagacaggagggctgatcagggaggggctgcgtgaagagagggggaactggccccgtcgaggcccagggaaacggagctgctgtctgcctccccagaaatcaaagaggctgtctcctcactcccttcatattggagttggcttcgaaagaccaagctccctgagtacaccagggaaggtaccgatgcgggatgggcctcaaggggagcctagggtcttaaccaaaggaatgtgtggtgagcagctcatccattcacacccccaccccttccttgtctttcatttcagctctctgtccccccgcctgccgtgagtaggaaaggaaaggggtagcaaggacctggggcctgcagggtgtcagaggagggcctggcagctgcaggaggaagctgggtaccaggcagggtggaggcccggcctcccctccccagcgttgcctctgctgtctcctgcagggggcagcaccacgctgtacaactgctccacctgcaaggggacggaggtgtcctgctggccccgaaagcgctgcttcccaggtcctcacgcccatcttggccccgccccaccttgcccagatccctgagcccttgggctcccaagtcggtgcgtgtgggtcccagaatcattcactgcctcctgggttccctgcaggaagtcaggatctttgggaagccaagattctgctcctctccatcttcggagctttcctgcttctgggtgttctgagcctcctggtggagtgagttttgggataaagacaggaatcctaccccgcccagtgccttccaccacccatcctccctccctctgtccctcccaggcccctcccgtaggcttcccaccctcgtcttccctcaggtcccaccacctccaagcaaaaagtggcttgtgaagacgctgaaaacctcccagcctccagctctaaggggtatgcactcacaacttccacatcccttggaggggaaccagtcagccccttagtcccagctccaaagacagtctccagaccctaaaacccagacatccctgcttctggttggtgagataatgaaaaacaagaaaatccccaaaaacccagatcccccacaatcccagtgtcagatggcctcccgggaacccaggcacccacagctggaaagttcctcccctccagccctcaaccaatcacatggctgtcaacaatgccaggaaaatatctacagaaggaaagaatcccctacgccactcccaccacacccacacccccttctgcctgttccgggaaagcgggggcatctgccccagaagctattccaggccctcctatgactgatggggaatccgggaatgcatgttctggaaaactcaccccactagagtgagatcacatcagtgggttcgcgggcatgccctccctccatcgtgttaacagtttgaaatcctggcctccctcagaggcctccatcctgccaggcctaagtaaaacttgctgttcatggcctctgcccctgcctagcctctgtctgcaactggggagggcagaggaaggatgggagactctcagagtagcacagtgcttctcagatgggggtgattttgcaccccagtagacattttgcaacatctggagtcgttttggattgttttaactggggggacgtgctactggcctctggtgggtagaggctagagatgttgctaaacatcccacaacacacaggaaagtccccacagcaaagaattatcccgtccaaaatgtcagtgtttaccaggaaagggagataggagaaaaaaaaaaagaaaagaagaaaaagaagaaggaggaggaggagaagaagaagaagaagaagaagaagaagaagaagaagaagaagaggaagaagaagaagaaagaaagaaaagaaagaaacaaaatgtcagagcatggttgagaaaccctggtgttttgtcccctgcctatcaggagtttttggtttgggaatggaacgtgggacatggaacatgagaagagaggcctgttgccaaccacaaggcacagtctgagtgcctaggcctggcagggattccagcccttacctagcccaggggttttcaaactgggtacctcgaggctccagggtaagcgttctcagccagctgcatatcagaaccacctgggcagccttaaaactagctgtgctttggccccagctccagagattctggaataagtggtcctatatggggccttggttactgtaacccacagccagggttagaatcattgtttggggtacccagagaggtcctaaggatgggtagaagaactcctaccccttccacggtagtacctctctctctctctcttttttttttttttttttttgagacggagtttcgctcttgttgcccaggctggagtgcaatggcgcgatcttggttcactgccacctccacctcccgggttcaaaagattctcctgcctcagcctcccaagtagctgggattacaggcacccgctaccacgcctggctaatttttgtatttttagtagagatggggtttcactatgttggccaggctggtggcgaactcctgacctcatgtgatccacccacctcagcctcctaaagtgctggaattaaggtgtgagccactgcacccaaccgtacctcgcccttttttttcaatatatatattttaaaaatttaaaaattattattattattttgagacagagtctcattctgttgcccaggctggagtgcagtggcatgatctcagctcactgcaaactctgcctcctgggttcaagtaattctcctgcctcagcctcctgagtagctgggattacgggtgcctgccaccatgcctggctaatttttgtattttagtagagatggggtttccctatgttggccaggttggtctcaaactcctgacctcaggtgatctgcctgcctcggcctcccaaagtgctgggattacaggcatgagccaccacacccagccgatttttaaaattaaaaaaatatatatatatattaagagacaaggtttcactatgttgaccaggctggtctcaaactcctggcctcaagcagtcctcttgcctcagtcttctaagttgttgggattacagacatgagccactgcattcagccaagtatctctctttttgttttacacattcaattccaatcccttcatataacacatgaaaaaaatgagacccagagatcatgtaagatcatataacttgtccaagatcatacaactcattcattcattcatttgacaaagacttagtgagtatccacccaccaagagggatgggaagccacatttcctgcctgctctggacggcagtaggtgcccgtaccctcccctgctgtcccctctttccaggttcaacattttggagccatccttgttttcacagtcaatattcaggaggccaaccagtcctgcccatttctttcttccttccttccttcctccctccctccctttctttctttcttccttcctttctttctttctattttttttttttttgagacagagtctcgctgcgatgcccaggccggacttctgtggcgcgatcttggctcactgcaacctccaccttccaggttcaagcagttctcctgcctcagcctcccaagtagctgggattacaggcaacgccatcatgcctggctaatttttttagtacttttagtagagacggggtttcaccatgttggccaggctggtcaggaactcctgacctcgagtgatccgcccgcctcggcctcccaaagtgctgagccaccatgcccggccagtcctgcctatttttcaaggatctctatcctgtctgtcccatccttccatagccccagcccacccagaaccctctcacagtggatcccagtctcccagaggcgccaccaggctgcctgctctcctggaatgctcttcaccctcagcggccgcgctggcctccctgaaaactccacactgctcacgacccccagccccacatcaaatgatgattaagaatttgggctttggagttgggctgcctggtttcaatcaaatcctggctttgtctcttactggaccgtgggcaagttatttaacctctctgtgcctgttttctctattttatttatttatttatttatttatttatttatttatttatttatttattgagatggagtctcgctctgtcgcccagtctggagtgcagtggcgcgatctccactcactgcaacctctgcctccctagttaaagcgattctcctgcctcagcctcccaagtagctgggactacaggctcccagcaccacgccgggctaattttttatatttttagtagagacgggttttcaccgtgttagccagcatggtctcgaactcctgacctcaggcgatccgcccgcctcggcctcccaaagtgctgggattacaggtgtgagccaccacacctcgcctcctcatcttttaaatgcagtaaatgtattttattgactctatataacgtttttaatctgtttacatttgaacatctctgaagtcagaatgcatcttaaactgaaggtatgccatggcttagtggatagtatttttttcttagcagtatataacataatggtatatcagcagggcacggtggctcacacctgtaaaaccggcactttgggaggctgaggtgggtggattgcttgaggtcaggagttcaagaccagcctgaaaaacatggtgaaactccatctctactaaaaatacaaaaattagccaggagtggtagcaggtgcctgtaatcctagctactcaggaggctgaggcagaggaatcacttgaacccgagaggcagaggttgcagtgagctgagatcacgccactgtactccagcctgggcagtagagcaagattccatttcaaaaaaataataataaaaaatttaaatattaaaaaataaaataatagtatatattacaattgatatattaaaattcgtgataaattcaatgaaatgcagtagtagttaccttatgggattgctgtgaagtctaaataagctaatataaaatgcttgaggccaagcacagtggcttacacctgtaatcccagcatgttgggaggccgaggcaggaggatcgcttgagcccaggggtttgagaccagcctaggcaacatagtgagacccccatctctacaaaaaaaaatttaaattagctgggtgtgtcagccgggcgagtggctcacgcctgtaatctcagcactttgggaggccaaggcgggtgaatcacgaagtcgggagttcgagaccagcctgacccacatggtgaaaccccgtctctactaacaatacaaaaattaactgggcatggtggcacatgcctgtaatcccagctacttgggaggctgaggcaggagaattgcttgaacccaagaggcggaggttgcagcaagccgagatcgcgccactgcactcctgcctgggggatgagcaagacttcgtctcaaaaaaaaaaaaaaaaaaaaaattagctgggtgtgatggcgcatgcctgtggtcccagctactcaggaggctgaggtgagaagatcgcttgaacccaggaggtcaaagctgaagtgagctgacatcacaccactgcactccagcttgggtgacagagtgagaccctgtcttaaaaaaaaaaaaaagaaagaaacacaaactcctccaacctctcatgccacatgctcaggaagagcttactagaggaatttatatcacaagggttcagagaaggggctggggttgtcaaggacataccctggagtctgccatgtgccaaacactgtggaaacaaagataaaaaaccactaggtgggtaggcacggtggctcatgcctgtaatcccagactttgggaggccagggtggttggatcacctgaggtcaggagttcgagaccagcctggccaacatggtgaaaccacatctctactaaaaatacaaaaattagccaggtgtggtggcaggtgcctgtaatcctagctactctggaggctgaggcagtagaatcgattgaacccaggagtaggaggttgcagtgagccaagattatgccactgcactccagcctgggtgatggagcgagactcggtctcgaaaacaaacaaacaaacaaacaaaaaacctgttagctggtggtttaatagggcagggcatggtttggagggaagatggattggtaaagaaacaccaccaccttgatgtgacacagctgagggatgtctagagaagggacacccccaggggctcagagaaggattctcagaagaggttgtgcctgagccaaaggagaaagacatcccaggtataaggacaagcctgggcaatgacagatgaaaaagcaggaggtgtttgggcagctacaggtgattcagtatggccgtggggggtgcgttgggtgggcagtgctgagagataaagccgcagggacatgtgggggccagattccaggaagtattacacaggtagatcacttgcttactgatgagaagtgggcatgtgggcatggcaggaagagaagaaggaagagaatgtccagggtacagttggcgctgccacgaagctccagagaggtcacagagaagtgatgggctcagggaggaaggtgagcttgaacatatggaatctgagatgcccgggcaggggcattcaagtggagattccaggtagggctacctttgaacagctctggcctgaggagcagatataacaagtgggagctgctgatggaaagcctggaatgtcagggtaaatagaggccaggccgggcgcggtggcttacgtccgtatcccagcactttgggaggctgaggcgggcgtatcaccaggtcaggagatcaagaccatcctggctaacacggtgaaaccctgtctctactactaaaatacaaaaaattagccgggtgtggtggcacgtgcctgcagtcccagctactcaggaggctgaggtgggggaatcgcttgaacccgggaggcggaggtttcagtgagctgagatcacgccactgcactccagcctgaagatagagcaagacttcgtctcaaaaaaaaaaaaaaaaaaagccaggtctataaactgcaggcaaggaagagagctagggcatgtctttttttttttttttttttttttttttttgagatagagtctcactttgctgcccagtctggagtgcaatggagtgatctcggcttactgccacctctgccctccgggttcaagcgattctcctgcctcagccccccaagtagcagggactgcaggtgtgcaccaccatacccggctaatttttatatttgcagtagagacagagttgcaccattttggccaggctagtctcgaactcctgacctcaggtgatcctcccaccttggcctcccaaagtgctgggattacagatgtgaaccagtgcgcccggccaggcatatatttaaacaagatattataacagctaatgctgagtgagtgccagtatatgtgggacacagtcccaagcattttatttatttatttattttttgagacagggcctcactctgtagcccaggctggagtgcactggtgcaatcacagctcactgcagccttggcctccccggttcaagcaatcctcctaccttagtctcccaagtagctggactatgggcacatgtcaccacgcccagctattttgaaatttttttgtagagactatctcactatgttgctcattctggtcttgaactcctgagctcaagtgatccgcccacctcagcctcccaaattgttgggattacaggcgtgagtcaccgcaccgggcctgtgtttctttctgtgcacataaagccagcccactggaatatggtctacagggctggtatttctgagcacctcccaaacaagggaggctgctgtgggtgcagaaacatttttaagtggcccccaaatcctctctgacctgccttccatggagaggcagattctatggatccttcccttgaatctgggctctgtgtctggctgaccaatggaatgtgggagaagtgacactgctccactttctgggcccacgccttaaggaactggcaccttccactctctgtctcttggggactcactctggaacctagtcaccatctctgaggaagcccagacttcaggaagagtccatatgaggggtcccagccaaacgccagcatctcctgccacacatatgagtgatattacagcccccagatgtccagttacccccagacttttatttttccaagacaccagatattgtaaagcagagattaaccccacagtgtcctgctggaattcctgactcaagaagtccagggcaatgatcaaacagtgtgttttttttgtttgttttgtttttttgagacggagtctcgctctgtctcccaggctggagtgcagtggcacaatcttggctcactgcaacctccgcctcccaggttcaagcaattctcctgcctcagcctcccgagtagctgggcctacaggtgcctgccaccacgactggctacatttttttgtatttttagtagagatggggtttcaccgggttagccaggatggtctcgatctcctgacctcgtgatctgcccaccttggcctcccaaagtgctgggattacaggcgtgagccaccacgcccggcccaaacagtgttttttatgccactaggtattatttcttcaaaacagatagttggttcagtgggacagaaaaaggagcctaggacatggcactaaatgtcttgggtttatgacacggctggccgggtccatcctagccatgtgcacggggggatattacttcagcaacctaagcctcagtcctcctgcctgcaaaatggagttaatgataactaatgtgtacggtgacagcgtgtcagacagtctaagcagttttttttggagacggagtctcgctctgtcacccaggctggagtgcagtggtgcgatctcggcttactgtaacctctacctcccaggttcaagcgattcttctgccttagcccccgagtagctgggattacaggcacctgccaccatgtccggctaacttttgtatttttagtagagacagggtttcaccatgttggccaggctggtctcgaacccctgaccccaagtgatcctcccgccttggcctccaaggtgctgggattgcaggcatgagcctccatgcccggctttcagtgtcctcttgacatggtggctggcttcccccagagggagtgatccaagagagccagacagaagccatgctgccttatacggcttgtctcagaagtcactcaccatcccttctggggatcccactggttacactgatgagccccattcattgtgggaaggtactatgggaatcccaatgattacactgatgagccccattcattgtgggaagggactatacaacaggaggaatacccggaggggtgttgcagccgcagccactttggaggctggttaccgcacatgtggacacagttacttctccaataaccccataaagtagatgctcctcatagacatatgttgtagatgaggaaacagaggtacagaaatgagaagtaacttgttcagattcacagtcttttaagtggtaaagctggatagaacacaggcaggcagatccagcgttgaggcctaagtcactgtgctgtcaagcatctcagatgcactgtgagcctgaaggaacatggtgggcacgagagagcttccactttggaaagcaaaacagcagatatgtacaaggggttgcgctgatgattgtaaacacaagtgaagcaaatgcaaattgggaaaggatggatgggaactcagggtcctaggagatgaagttggggtgacagaacaggaagggtgggccgggcgcagtggctcacgcctgtaatcccagcactttgggaggccgaggtgggtggaccacgaggtcaggagatcgagaccatcctggctaacacggtgaaaccccgtctgtactaacagtacaaaaaattagccgggcgtggtggcgggcgcctgtagtcccagctactcgggaggctgaggcaggagaatggtgtgaacccgggaggcggagcttgcagtgagcctagaccacaccactgcactccagcctgggtgacagagtgagactccatctcaaaaaaaaaaaagaacaggaagggtgtacccaagggtctgggaagagctgactgcgcagggccagggagtaccaaagtgggagggcctcatggatgggttcagaagaagagtgcttattggtgaggtttggagattgccattcccatcacttccggcacaggagctcttaattacaaacctctcctttgcttcactcaattcagatgactctgtctcatccattcgttcaggaaatgtcactgagcacgtagcatgtaagtcaggcgatagactgaacgggggagacataataatggccgggcaagataaggtccttggctacctggagcttagagtctagcaggggagacaagttactggcaaattctaccagagtgatgagtgcaatgacaggaaagcacgggggacttgaggtgcagaggaagacaccagagcagtcagggataggtgttttttttgttttgatttgtttttttgagacagagcctcactccgtcatccaggctggattgcagtggcacgatctcggctcactgcaacttctgccttccagattcaagtgattctcctgcctcagcctcctgagaagctgggattacaggcgcccgccaccatgcccagctaatttttttttttttttgagatggagtcttgctctgtcacccaggctggagtgcagtggcgcgatctcggctcactgcaacctctgcctcctgggtttaagcgattctcctgcttcagcctccagagtagctgcgattacaggcacacgccaccatgcccagctaatttttgtatttttagtagagacggggtttcaccatgttggccaggctggtctcgaactcctgacctcaggtgatccacccacctcagcctcctaaagtgctgggattacaggcgtgagccactgcgcccggccagggataggtgtcttgcatttagcaagtgagacaagagtaggccagattgggaagacttttctcagcagagggaacagccatgcagaggctcaggggagagcgagccaagatgctgaggtgctttcccctgttgaaagcctggcttgtggatggtggaagggggagagctgggtgatctcaggatcagagcagggaaggagaagctaaggaggtaccaatgtagttcctcactggcatggagaggcctctgcacaggaatgggcctcactcaacctgtgcttctcccatcccacccccatccaaggtggtgagggcagccaggcagccgagtaccctctctgcttatcttcccctgtaggggaagaattggccctgctgctgtgaatgtggtcctcattcccagatgcagagcctgcggggcagggcagaggttagggaagggcagttggagtgggcggtgccccatctgggtctccaggtttaagtgttaatgggtgctgcattccagcctgaaggagatgctccctaacagcgattaggatggccgggctgtgcttcccctacatcccaccctctttatgggcaaaggtggggatgggagaaacttaaatccaaaagtaaaaaataggccggtgcggtggctcacgcctgtaatcccaacactttgggaggctgaggcaggtgaggtcaagagttcaaaaccagcctgaccaacacggtgaaaccccgtctctactaaaaatacaaaaattagtctggcatggtggcaggtgcctgtagtctgagctacttgggaggctgaggcaggagaatcgcttgaacctgggaggtagaggttgcagtgagctgagatcatgccactgcactccagcctgggtgacagagcgagactccatttggaaaaaaaaaaaaagtaagaaataaacaggaagaaggggagaaataaaaagtcttctaggccaggcatagtggctcacgcctgtaatcctagcactttgcgaggccgagacgggtggatcacctgaggtcagtagttcaagaccagcctggccaacatggcgaaaccccgtctctactaaaaatacaaaaaatattagccaggtatggtggtgcaatgcctgtaatcccagctactcgagaggctgaggaaggagaatcgcttgaacccaggaggtggaggttgcagtgagccaggcgcaacaggagcgagactccatctcaaaaaaaaaaaaaaaaaggcttctaattccctggattttttttcccaagcccaagctaaaagcatgcttgagtctccgcctccggtttcctgctggggcaagatagggtgaaggggacctgagcctggagtccaacccacggtgccccgtctcctcggcctcccctccatctgtgatgctgtgatataataagaaatatatatttgatatttaccctggtctctggcacagagctcctgtaacccttggaatttcctgagtgacagtggtgccaggagcatctgttgttattcataagcccctttcaaccatacctgagctgatgctgatggggtgactcttggaggatgggggctggttgccagaggaaccaaccatgtgattagagggttggaactttcaaccccctccccagcctccacgtagcggggagtagctgaagagtgagttcaattaccaaggccgatgatttaatcaatcatgctacataatggagcttctataaaaaccccaaacaatggagttcagagagtttccaggtcggagaaggcttggaggcgctgggaggatgtcatgcccagagagggcacggaagctgcatacccctcctgcaaaccttgctggaagcaactcatccacctggttattcatctgtatcctttgtgatgtaatttccttcctccctccctccctcccttccttccttccttctttctttccttccttccttcttgacagagtctcactctgttgcccaggctggagtgcagtggtgcgatcttggcttacttcagcctccgcctcctgagttcaagcgattctcctgcctcagccacctgagtagctgggattacaggcatgtgccaccaggcctggctaatttttgtatttttaatagagatggggtttcaccatgttggccaggctaatctcgaactcctgacctcaagtgatctgcccgtcttggcctcccaaagtgctaggattacaggtgtgagccactgcggctgaccttttttcccagctaatttttgtattttttgtagagacgtggtttcaccatgttgcccaggctggtctcaagctcctgagctcaagccatctgcccacctcggcctcccaaagtgctgggattacaggcgtgagccaccctgcctgccctgtaatatcctttaaaacaaactggtaaatgtaagtaaatgtttccctcagttttgtgagccattctatcaaattattcaacccaaggtaggggtcgtggggacccctgagttctaactggtcagtgagaaggacagaaggctcggaggagcagttggcatctgaagtcaggggcagtctgtgagaatgagcccttaaataggggtctgcactaactaggtactgagtgccagaaccgaattaaattataggacacccagttgatgtctgcagagaattggagaattgcttggcacggggaaaaaacccacacatctggtgtcacaatggtatgtgagagtattaaaatatgttttttttttcctttttatcactccataagcagggcctcagcaggccagtctcactctcctaatccagtcgtcagtgcccctccgctttacctcctgcttccccctcgccctctcccggtctccacagcaggctgattctgtcactcccctgtgtaagacaactcctcagagccctcaggtaaggcccaagctccttaccatgttctgcaggccctctagaatgaagctcccctgggggagattgtgtctgcttgttcacctgggttcccagaacctggcacggagtagagactcagtcaaagtttgctagagggatgaatcaatgcctgctccggctcccgcctctctggctacatctgccttcatctctccccatgtgccctagcctcacgttcattcaattctcagatgacctctagtacttcccagagtacactgggtgttcaaaggaaagtcagatttcacatgatcttccctgaagaagctcatggaaagactgtgtttttcctaccaagaacttggactttgctcattccatcccttcagcctagaaggcttagcaacatctgacctgtccttcagggctcagctcaagtgctactacctatttatttatttatttgagacagagttttgctcttttcacccaggctggagcgcagtggtgcaatctcggctcactacaacctccgcctcccagattcaagcgattatcctgcctcagcctcctgagtagctgggataacaggtgcccgccaccacacccggctaatttttatatttttagtagagacagggtttcaccatgttgaccaagctggtctcgaactcctgacctcaggtgatccacccacctcggcctcccaaagtgctgggattgcaggtgtgagccaccttgcctggccatttctgcctctttcttgaagtctgccttcatggttttattcagcccagtgagaacattcacccacttctttgcattcccaaggccccctcagttcttccttacatgagagctactgctttcattaattattttatggacttattcacctaataacatgtactgagaacctgctttggacagtactcgttgtgcgcagctgcagtcctagctccttggaaggctgaggcgggaggatcgcatgctaatttgtaaacccactgcaaggtaaggaagctgaactgagactcctgcattaatctgggactcctgaaagaagctaaaactgtctcaagttgtttgcaacctctggcatctggcagaagcaaatgaaatttctctctggagtaaaacatctcaaatttaggcacttggaattcctacagattaagatcaataaaatataatattaaactgtgtacagtggtacatacccatagtcccagctactcgggaggctgaggaggaggatccctgaagcccaggagcttgagactgcaggacactataattgtgcctgtgaatagccactgccctttagcctgggcaacatagcaagacctatctctaagagaaaataaaatataataaaatgtaatataatttcacaatcatagacacacaaggaaacaatccaccgtgaatgagagtcagcagaaacaatgactataaatttagatctgtaaggatattaaaaattggaataaaaacaaaactatgaatgaagaattaaagaaaatgtggagaccgggcgcagcggctcacacctgtaatcccagcactttgggaggccaaggcaggtggatcacacggtcaggagaccgagaccatcctagctaacatggtgaaaccccatctctactaaaaaaatacaaaaaaattagctgggcatggtggcaggcacctgtagtcccagctgcttgggaggctgaggcaggagaatggcttgaacccgggagtgcagagcttgcagtgagatgagattgcgccactgcactccagcctgggcaacagagcaagactccccctcaaaaaaaaaaaaaaaagaaaagaaaatgtggaataggccaggcatggtggctcatacctgcaatctcagctctttgggaggccgaggtaggaggattgcttgagctcaggagtttaagaccagctttgacaatataatgagactccatctctacttatttaaaaaaaaaaaaaaaagggccgggcgcggtggctcacacctataatcccagcactttggaaggctgaggtggcgcatgcctgtagtcccagctactcaggaggctgaggcagaagaatcgcttgaacccaggaggcagaggtggcagtgagctgagatcacgcaactgcacaccagcccgggtgacagagcgagactccgtctcaaaaaaaaaaaaagggctgggcgtggtggctcacacctgtaatcccagcagtttgggagcccaaggcaggtggattacctgaggtcagaagttcaagaccagccttgccgaacatggtgaaaccccatctctgctaaaaatacaaaaattagccaggcgtggtggcgcacacttgtaatccttaggaggctgaggcacaagaatcccttgaacctgggaggcagaggctgcaatgagcgaagatcatgccactgcatgccagcctgggaggcagagtgagacactgtctcaaaaaaaaaaacaaaaaaacactcccaaaaccaaaaaaaaaaaaagaaaacaacaaccaaaagagagaatgtgaaatgaaaaatgagaaagcaacaagatcccatctatacaaaactaaaaataaaaaattagttggacatggtggtgcatgcctgtaatctgagctacttagaaagctgaggtgagaggatcaattgagcccaggagtttgaggctgcagtgagctatgatcacatcgcatcactgtactctagcctgggccacagagcaaaaccttgtccaaaaaaaaaaaaaagaaagaaagaaaaaagaaaacaaaaagaaagctgggcacggtggcacacacctgtggtgtagtcccagttcctcaggaggttgatttgaggtgagagaatcatttgttgcccaggttattctcaaactcctggcctcaagcgatcctcccgccttggcctcccaaaatgatgggattacaggcatgagccaccatgctgggccgagtccaggagtttgaatcagcctgggctgggcaacatagctcctctctctctctttttcttttttttctttgaaacaagttcttgctctgtggcccaggctggagtgtgatggcaccgtcatggctcactgaagcctcaaattcctgggctcaagcgatcctcccacctcagcctcccaactaactgggactacaggtgcatgcaaccaggcttgactaatttttaattttatttttgtagagacaggggtctcactatttcgcccaggctggtcttgaactcctggcctcaagcaatcttcccacctgggcctcccaaagtgctgggattacaggtatgacccatcacacccagccgaaacaattaattaattactatttggttttatttgagacaggctctcgctctgtcgcccaggctggaatgcagtggcaggatcttagctcactgcaatgtccacctcctggtttcaagcaattctgctgcctcagcctcctgagtagctgggactacaggtgcttgccactatgcccggctaatttttgttatgttttgtagagacagaatttcatcatgttgcataggctagtctcaaaatcctaggctcaagcgatcttccagcctcagcctcccaaaagtgctgggattacagatgtgagccacagctcctggcacaattaattaattttttaaaaaataataaagcaacagaagactataaaagatgaccagggacattaaagagacaaaagtatctttggctgaaaaaatgacatgaaaaatgtaattgctgaagtttaagaaaaactcttttttttttgagacagagtctcgctctgtcgcccaggctggagtgcagtggcacaatctcggctcactgcaacctccacctcccaggtttaagcgattctcctgcctcagcctcccaagtagctgggattacaggcatgcgccaccacactcagctaattttcatatttttagtagagacagggattcaccatgttgaccaggctggtcttgaactcctgacatcaggtgatccacccactcggcctcccaaagtgtgggattgcaggcatgagccaccatgcccagccccccaaaaatactcttaaattgacacaaaaagcactaaaagaaaaaaatgaataaattagactccacccaaatttaaaactttttattttccaaagacactgttaagaaaataaaaggggctaggcatggtggctcacacctgtatctcagcactttggaaggccaaggcgggtggatcacctaaggtcaggagctcgagaccagcctagccaacgtggcaaaaccccatctctactaaaaatacaaaaattagccaggcatggtggggtatgcctgtaatcccagctactcaggaggctgaggcaagagaatcgcttgaacccgggaggcggaggttgctgtgcgccaagattgccccacttcactccagcctgggcaaaagagtgagactccgtctaataaataaataaataaaggtacatggatggcaaataagcacatgaaaagatactgaacacattaatcattagacaaatgcaaagtaaaaccacaatgatggctgggtgcagtggctcacgcctgtaatcccagcactttgggaggtcaaggcaagtggatcatctgaagtcaggagttcaagattagcctggccaacatggtgaaactccgttgctactaaaaatacaaaaattagctgggcatagtggcacatgtctgtagccccaactacttgggaggccaaggcaggaggatcgcttgtacctgggaggcagaggttgcagtgagctgatatcatgtcactgcactccagcctggactacagagcaggactccatctaaacaaacaaacaaaaaaccacaatgagatatcactatggcactgactagaatggctaaaattagaaagtgttgctgaagatgtagagcaactggaactttcatactctgctgggaagactttgaaatggtacaaccagctggatgcagcagctcacatgtgtaatcccagcatttggggaggcagaggcaggaggattgcttaaagccaagagtttgagactagcctgggcaacacagtgagaccttatctctactaaaaattaaaaaaaaaattagccaggcattgtggcatgcacccatggcctcaggtacttgggaggctgaggtgggaggatcatttaagcccaggagtttgaggctacagtgagctatgatcataccactgcactccatcctggttgatagagtgagactttcttgctaaaaataaataaataaataggccgggtgtgatggctcacacctgtgatcccagcactttgggaggccgaggcgggtggatcatgaggtcaggagatcaaggccatcctggctaacacagtgaaaccccgtctctactaaaaacacaaaaaaaattagctgggcctggtggtgggtgcctgtagtcccagctactcgggaggctgaggcaggagaatggcatgaacccaggaggtggagcttgcagtgagccgagatcacgccactgcactctagcctgagtgacagagcgagactccgtctcaaataaataaataaataaataaataaataaataaataaatagccaggcgcggtagctcacacccgtaatcccagcactttgagaggctgaggcgggcagatcacttaaggtcaggagttcaagaccagcctggccaacatggcaaaaccccatctctactaaaaatacaaaaattagctgggtatggtggctcgcacctgtagtcccagctactcgggaggctgaggcaggagaatcatttgaacccaggagatggaggttgcagtgagacaagatggcaccacttcactccagcctgggcgacagagtgagactttgtctcaaaaaaattttttcttggccaggcacggtggctgacacctgcactttgggaggccgaggtgggtggatcacctgaggtcaggagttcgagaccagcctggtcaacatgattaaaccccgtctctactaaaaatacaaaaaattagctgggcatggtggcacatacctgtaattgcagctactcaggaggctgaggcaggagaatcgcttgaacccaggaggcagaggttgcagtgagccgagatggcaccactgcactccagcctgggcaacaagagcaaaactccgtctcaaaaaaaacctttttttattttaataaataaatgaaatgaaatggtaaaaccactttggaaaacagtttttttggtttcttaaaaaattaaacatacctggccaggtgcggtggctcacgcctgtaatctcagcactttgggaggccgaggcaggcggattatgaggtcaggagatcgagaccatcctggctaacatgatgaaaccccgtctctactaaaaaatacaaaaaaaaattagctgggcatggtggtgggcacctgtagtcccagctacttgggaggctgaggcaggagaacggcatgaacccgggaggctgagcttgcagtgagctgagttggcaccactgcactccagcctgggcgacagagcgagactctgtctcaaaaaaaaaaaaaaaaattaaacatactaattttatgacccagacattccactcctaggtatttaccaaagacaaagggaaacatatgtccacacaaagacttaaagagagtggtcacagcagctttattcataatgggcgaaaactagaaacaacccaaatgtttatcaacaggtgaatgtataaacaaattatgatacatccatacaatggaatactactcggcactaaaaggggatgaatactgatgatacatacaatatcatgaatgaatctcaaaatagttattctgagtaaaagaaggcaggcaaaaaagaatgcatactgtaggattctatttacataaacttctaggaaatgcaagctagtctagagtgacagaaacagatcagtggttgtctgaggaacgaggggcagaagagattacaaagggacataaggaaactttaggggtggcaatatgttcattactgtggttatggtgatggtttcatgagtgcacacatttgtcaaaacttatcaaatcacaagctttaaatatgggcagtttattgaatgtcaattatacctcaataaagctgtaaaaaaaaaactccagtggataaaaataattcatatatccatcattaggatactagatttgaaaagtaatatatttatataatgaactactacttcataataaaaaataactactaatatacacaacagcatagatgaatctcaaaaagattatggtgagtgaaataagccaaaaacaaaaaaactgaataagcactccatttataagatctagagcaggtaaagtgatcattgttttttttttttttaatcctttttgtgtgtgtgtgggtgggggcggggtgaatggagtcttactctgtcaccaggctggagtgcagtggtgcaatctcagctcactgcagcctccgcctcctggattcaagtgattctcctgcctcagcctcccaagtagctgggattacaggcacatgccaccatgcccagctaatttttgtatttttagtagagatgggtttttaccatgttggccaagatggtctcgatctcttcacctcatgatccgcccggcctcccaaagtgctgggattacaggttgagccaccgagcccagcattttttttttttttttttttttttgagacaaagcctcactctgttgcccaggctggagtgcagtggcatgatctcggcttactgcaacctctgcctcccaggttggagcaattctcctgccccagcctcccacgtagctgggattacaggcgcctgccaccatgcctggctaatttttgtatttttagtagagacagggtttcaccatgttggccaggatggtcttgaactcctgacctcaggtgatccacctgcctcggcctcccaaagtgctgggattataggcgtgagccaccgcgcccggccagatcattgggttttaaaaatcagagtagtagttccttctgggggatgaaattgactaaaaatagacacaagggaactttatgggatgaaagaaatgttctggatctttagccacattaatagatgtgtacatttgttgaaattcatcatattatacagttaaatgtgtacatgttactgactatagattatatctcagtaaaatagtgtaatgaagtagagtaggggccgggcgcggtggctcatgcctggattcccagcactttgggaggctgagacaggtggatcacgagttccggagttcaagaccagcctggacaatatggtgaaatcccgtctctactaaaaaaatacaaaaattagccaggcatagtggcaggcgcctgtcgtcccagctaatcaggaggctgaggcaggcaactgcttgaacccgggaggtggaggttgcagtaagccgagattgtgccactgcactccagcctgggcgacagagagactctgtctcaaaaaaaaaaaaaaagaaagaaagaaagagagagagaaagaaagagagaaagaaagaaagaaagaaagaaagaaagaaagaaagagaaagaaagaaaaagaaaagtagagtagggccaggcatgatgatggcccacgcctgtaatcccagcactttgggaggccgaggtgggcagatcacaaggtcaggaatttgagaccagcctggccaacatggtgaaaccctgtctctactaaaaatacaaaaattagctgggcgtggtggtgcggctgtaatcccagctactccagaggctgaggcaggagaatcgcttgaaaccggaaggcggaggttgcagtgagccgagatcgtgccactgtactccagcctgggcaaaagaatgaaactccgtctcaaaaaaaaaaaaaaaagaaaagaaagtagagtaattttcggccgggcacggtggctcacgcctgtaatcccaacactttgggaggctgaggtgggcggatcacctgaggtcaggaattcaagaccagcatgatggcgggtgcctgtaatcacagctacttgggaggctgaggcagaagaatcgcttgaacctgggaggtggaggttgcagtgagccaagattgcaccactgcactccagcctgggctacagagcgagacttgtctcaaaaaaaggaaaaaaagtagagtaattttttttttttctctgtcacccaggctggagtgcagtggcacaatctcggctcactgcaagctccacctcctgggttcacgctattctcctgcctcagcctcccgagtagctgggactacaggcgcctgccaccaggcccggctaatttttttgtgtgtgtgtatttttagtagagacggggttttcaccgtgttagccaggatggtctccatctcctgacctcgtgatccacccgcctcagcctcccaaagtgctaggattacaggtgtgagccactgtgcctggccaagtagagtaattttcatatgagtataacaacaaccaaaaaataaaattaaaaaacccttccatgtaaggattaaacagcacatcagatgtaaccaaagagagaattagtgaactggaagacagactggaagagattacctgaatgtatcaccaagacacaaagagatgaaagatacaggagacaggttaaaagacacagagtacagaatgaaaaggtctagaacactcctaatcagagttggcaaaggagagagcacagaggacagaggaaaaataatatctggatggtttctgagaactttccaatatgataaaatacgataaaagatgtgaattcatacatacaggaagtacaacatattgagcagaataaatagaataaataaacatctagatacattgtgacaaaactacaaaacaccaatgatatcttaaaagcagggagtaaaaagagatcatctacacaacaatgaggattagactgaggagacttctttacaaccaacatgtatcaggcctattatatgcccacactgtcctaggtacttagaacacaagtatgaacaagccaggcccagcccctaccctgtggagctacagaacctctaacagggatcgcagatgtgcagtaacaattatagtgtgatgagcgatcctggttggagggcaaaagaatcggcaagaaaacaataccatagaacagcattatgaagattttcctatcccacgtaggatccacacagggactggcccccaagcacagatccttgctggcagcctgagagtcactcggtctaacttggtttcaaggcaactccaccagcctttattaaataaggctctgggtctctgggtactggctgcctgctcacactttcccttacagacatctggacccctcccttaccccacattataagcaaggaggaagaagaggacccgaggctgggaaacgtggaggtggcagttgggatcaaacatcctacatgtttaccaagaccaggagggcttttccctccaagggacccttgggacagcagctgctatgttcacgcgtccttccttgggacaggggacagactagatgtcctaagactggcagcttcctctctgggacccctgagagaagcggagacaaatggtcctcctcagggccttcttcaaggtcctggacttagtcccagtggccacaggctaggtagcagtgtgcagggccctgagttctgcagagcttgcatggagagcaggcgttacgctggaaggaagcccaggagtgtcagtaatggggaagcgtgccctgaggcatggaatgctgccggtgatcaacaacagcttcaactgtagactctgtctaggccagggccaactctccgtaccagcatcaacatctctctgccctggccccattccagggttcattaagtaaagcctgctaggaagctctgaaccccctgccatggggcaggaactgtgtcctatttagccttatattccctgtgcgtggacaggatagctctatcgggcgcttattcatgtaagaggtagggtcctggctgagaggtgaaggatttggcgagagggcatgggggacagagacagaggagtgaagtctggggagggctgggaagctattcggagaaggctggaaagacgtgaaggaagacgagcagaggagaagggaagggggcttctcacagtcggggcgatctggtctggaggagggaggggccgccagtcgccctggggaccgtcaccttgtcccactagggaactcggggtgcggccctcgccggccccgggccagcggccaggtccccgccctccgcgggatttactcctgtcccgcctcctcggatttagcccaggcagcctgggaggttccgcagtcgccgcttccgccttgaccaggtgagggtccggaccgagcagggggcccgggctggggagagccggcggagcagccgtcgctgggggcgcgtccggggggcgctgggcctgtcctcttctcctgcgtccttccctcccgcagccgcgcttcctcctgtctcccttctgcgctccccgcttcccaccgagcgcgcagggccgggtcccccagggtcctgggctttctccttcccaacccaaccctgttcgcgcccggttctgagtccacctgcgcgtttccaactaggcccagcctcgatcctcttcttcctccttgcttataatgtaggggaagggacgggtccaggagtgtgctagggaaagtgtgagcaggctgccagtacccagaggcccagagccttatttaacaaaggttggtggagttgccttgaagccaagttagaccgagtgactcaggctgccagcaggcatctgtgcctggggctgagctcaggtaggtgtgggactgtgtacctgacagcctcagtggctccataggcagcacctaagcctagcggccatcacaagtgcctgatttgatttcaaatgttgctgcctccggtggaggagaggcaatgactgtggacctcttttggcttgaggggtccctatgcccccatagctcaggtatgctgtgtgcacactgtacctcgatgtctgtgtgttgtgttcatgtggacctttgtgtcttagccgtgtggggcagtgtatctaggtgtttggaggcagtgaactgccatgtcccatggatgtgacacgtatgtacaaggaacatctcatggaaggacacagatgagcctgggcgttttgtggccgcatgctgaaatgtctcagcgttaagacgacatatatcggccgggcgcagtggctcacgcctgtaatcccagcactttgggtggccgaggcgggcggatcacgaggtcaggagttcaagaccagcctggccaatatggtgaaaccccatctctactaaaaatacaaaaaatagccgggcatggtggcacgcgcctgtagtcccagctacttgggaggctgaggcagaagaattgcttgaacccgggaggcggaggttgcagcgagctgagatcacgccactgcattccagcctagatgacagagcgagactccgtctcaaaaaaaaaaaaaaagaggacatgtatttgggagtctcggccatgttttgcagtatatctgtaggtctcagtgtgtgtgtgtggcagcatgtgggaggcagtgtaccttcgtgtgtgtgcgtgctctacctacatgtctgaggtatggtgtggttgtcatatctgagcatctccagtgtgtgtggtaggcaaacatgtctcatgttggaggaagggagatgtctcatgttggaggaagggagatgtcgtctcaggtgtgtatgagtgagtttgtgccactgcgtagctcaggtctaaaagggcagtgtttctgggtgtccgggtgtgtgatgtgccgtgatatttcagagtcaggatggtaacatacctggagtctgtagtaggagcaggcagtatgctaaaattgcaggtgtgagcagggcaggttactcagcggtgaagggacagagtacccggatgcctgggcacggggaacattctatctgggatttgtgtgcgtgagtggcagggatcctggctgtctctgctgtgtccctgcctctgtacctgagtgtttctaatgacttgcaggtggagctggagacctggtctctctagggcctaccctgagctcaccatctgaaggagagtgccatcatccttaggaactccttctccagacatgcttcctgaggctggctccctgtggctactgaagctgctccgggacatccagttggcccagttttactggcccatccttgaggagcttaatgtcactcggccagagcacttcgactttgtaaagcctgaggacctggacggcattggcatgggccggcctggtgagggacccctgccccgaggccctggtctctctgtccacagcctatcagttgccttcccccaccacaaccctcttccagcccttttcttccctgtaagtctctccgcactcttccccacacccacctccactccagccctgattctggcctcccacagcccagcgcagactgtccgaagctctgaaaaggctacgttctgggcctaagtctaagaactgggtctacaaggtgtgtgttgtaggtgggcagcttgggcctgggaatgaggtggcttgaggggcagggaggggggcgcagggctctgcataccggatttcccatccctgtttcagatccttggaggttttgcccctgagcacaaggagcccaccctgccctcggacagcccacggcacctccctgagccagaggggggcctcaagtgtctgatcccagagggtgctgtttgcagaggggagctgctgggttcaggctgcttcggtgtggtgcaccgagggctgtggacgctgcccagtggcaagagtgtgagtgtccagggagcccgcttcatccaggccagctgccccctctgttcttcatgcccgcaatgcctaaaggcgcttccccccacctccaggtcccagtggctgtcaagtccctccgggtaggtcccgaaggcccgatgggcacagaactgggggacttcctgcgagaggtatcggtcatgatgaacttggagcacccacacgtgctgcgtctgcacggccttgtactgggccagcctctgcagatggtgagcagatccagccgctggttcccgggacagccgtgcggcaggagcgtgggcggccagggtccaatgggtccggctcacgcggcgcggtgttccctcctgcaggtgatggagctggcgccactgggctccctgcacgcgcgcctaacggccccggccccgacacccccgctgctcgtggccctgctctgcctcttcctgcggcagctggcgggagccatggcgtacctgggggcccgcgggctggtgcaccgagacctcgctacgcgcaacctactgctggcgtcgccgcgcaccatcaaggtggctgacttcgggctggtgcggcctctgggcggtgcccggggccgctacgtcatgggcgggccccgccctatcccctacgcctggtgagagcgggtccgcgggcggtcgggctctgagccgggcggatccggagggcagcagccgagggagatcggagggggccgggcttctgagggaggcttggaccagaagggttatcctcctaggcaaagaggacttttgtgaaagatgggtgcactcgggggtgctccgtggagggtgggcctccaaggagcacgtgtcccgcccctttcagctccacttccttcggcaggtgtgccccagagagcctgcgccacggagccttctcgtctgcctcggacgtgtggatgtttggggtgacgctgtgggagatgttctccgggggcgaggaaccctgggccggggtcccaccgtacctcatcctgcagcggctggaggacagagcccggctgcctaggcctcccctctgctccagggccctctactccctcgccttgcgctgctgggccccccaccctgccgaccggcctagcttttcccacctggaggggctgctgcaagaggtgggaacccccgacctcaccagatacacagtccctcttccctccattcgctctcccagggttccatgcgaagactaacacatctagatgtctgtgctgggctctgggactcagctctgagcaaaacagatgcagtccctacctgcagggagatcagagccctggggaggcagcttggggctacacagatgcagactgaaaggctggggtctgtgtctgggccaggaaaggggcatagaggagacagcactcagttgcagtcgtgttgacacgcagaggaagagaagggctcagcgtgggaggggaaaatagaaataatgaagccgcaggccgggcgcggtggctcacgtctctaatcccagcactttgggaggcggaggtgggcagatcacctgaggtcgggagttcaagaccagcctgaccaacatggagaaaccccgtctctactaaaaaatacaaaattagctgggtctggtggtgcatgcctgtaatcccagctactcgggaggctgaggcaggagaatcgcttgaacctgggaggcagaggttgcggtgagccgagatcacaccatcgcactccagcctgggcaaaaagagcgaactccgtctcaaaaaaaaaaaaaagaagaagaagaagaagtaatgaggccacagagagagcaggagctgtgtcatggagggctttgcaaggcgtgttaagctaacacgtagagcacttgacctgtgcaggacactgcactgtgcactttacatgggcgcttatgcagattcgctcatttaatgctctcaaccactggatgaggtaattattattagtagtattttattttgagacagtcttgctctgtcaccctagctggagtgcagtggtgggatcttggctcactgcaacctccgcctcctgggttcaagcaattctcctgtttcagcctcccgagtagctgggattacaggcgcctgccaccacgcctggctaatttttgtatttttagtagagatggggtttcaccatgttggccaggctggtttcgaactcctgacctcaaatgatccacctgccttggcctcccaaagtgttgggattacaggcatgagccaccgtgcccggcctggatgaggtaattattatctccatgttactgatgggcagttgaggcactgagagtttaagtgacttgcctaaagtcacatggtaagtggaggagttgggatttgagccagtcagtttgacttcagagctgttccctaagctgctacactctaccactaaagcttagtctttactctgaaggcatttgggagccagggaagcctattaggcaggggagttacaagccactctcaccatgacggcactctgatgtggcgcaagaatggattagagggatgatgctgaggctgggagaccaggtaggcaacagtggctgtgaagcagaagggagatgaagaggtctggatgagggtagaggcggtggggctgcagaggagtggaaatttcccagaggggcttgggaggctgctctgacaggcctggatgtggagtgaaagcagtgtacaggatgacgctcctgttagtccccccaggtagagccagggccctcctctcttgctccttgagccctgacctgtttgtcatgggatccaggtctgcctccctcactgaattacaatggggggacagggagagtcccaccctgggcccagcacagactacatacagagcggagctcctctttattcctgctcccatattacctatctgactcaggccacaagcccagccaccctttcctcttgtctccacaggccgggccttcggaagcatgttgtgtgagggatgtcacagaaccaggcgccctgaggatggagactggtgaccccatcacagtcatcgagggcaggtgacagtcccatacctcccaagcaccctcaggaggaggataccctcccagcctaattcctgatcccttctctgcttctctccagctccttgaaccctgatcttctgtctcatctcctctccccactgggtcctgaaagctccagcatggtcctggcctccctgctggagccactgctggcccatagagccttattgcattagggaaaaggcttcccttcctccaggcagatgcggctccaaggcacatagcctagtgagctgactgtgggccagggcccagccctaactcttgcccttattcccatcctatttaccagctcctctttccacagccccgactccacaatctggaagggccagaatggtcgcaccttcaaagtgggcagcttcccagcctcggcagtgacgctggcagatgcggggggcttgccagccacccgtccagtccacagaggcacccctgcccggggagatcaacacccaggaagcatagatgggtgaggacctgaaagggtgagggcaggggttggctgggagaactgatgaggtccaggagcttctctggaagagaagcctggggacaggaccagagtgaagctgcagcctccaccctgggccctgggtctcctgggttcccctgtgagtttttttgggagggtatattgatctgtggggtggggagagttggtgtggaggatgaactggatccctctccgacagagacagaaagaaggcaaatctttgggatgcgcccccagcacggggccagaggaggaacatgcccctggagaggatgaaaggtgggtgtggtggactccagagtctctgaggagatcaagaccagtccttcaattccgaccccctgccctaaatccatgcctttgcatctattatttccttcctctgaattctgtctgctggcatcctagctatactgtgcaatctattttttttttttttttttgagacagagtttcactctttttgcccaggctggagtgcagtagcgtgatcttggctcaccgcaacctccacctcccgggttcaagcgattctcctgcctcagcctcccgagtagctgggactacaggcatgtgccaccacacccggctaattttgtatttttagtagagatgaggtttcaccctgttgcccaggctggccttgaactccccacctcgggtgatctgcctgcctcggcctctcaaagtgctgggattacaggcgtgagacactgcgtccggccctatactgtggaatcttaaaagataggaagccctcctgccttcccttctgaagagcacctccacactctgggccctgagctctgagttctctgggccctccgcctaggccttggtgtccacttgcccatctgtcttattgtcccacctgacacatgaaccacccagggacagggctggctagctcatctgcaaatgcttgcaaaaccatccagctcagcacagatgaagacagagagtggggccaggcatggtggctcaagcctgtaatcccagcactttgggagcccagcgtgggtggatggcttgagtccaggagtttgagaccagcctgggcaatgtgccgaaaccccttctctacaaaaatacaaaaattagccagtcgtaatggcaggcacctatagtcccagctactcgggaggctgaggtgggaggatcgcttgagcccgggaggcggaggctgcagccagccgagttcaagttgtttccttctcaactgtgcaggcatttccaggagtctggagtcagttctgtccctcggtcctcgtcccacagggggtggttcaagcccccctgaaattcgacaagccagagctgtgccccagggacctccaggcctgcctccacgcccacctttatcctctagctctcctcagcccagccagccctctagggagaggcttccctggcccaaaagaaaacccccacacaatcaccccatgggaatgcctggagcccgtaaagccgctgccctctctggaggcctcttgtccgatcctgagttgcagaggaagattatggaggtgaggtctcactgaaatggcctggtgtccagaaggggctacaggcaggggcaggggcctgagtgaggctttgtctgtcacaggtggagctgagtgtgcatggggtcacccaccaggagtgccagacagcactaggagccactgggggagatgtggtttctgccatccggaacctcaaggtaaagccagccccttctcttggggtccctcctctcctgcccctgccgcctggcagtcagctgcaacccaccctcctgcttccacaggtagatcagctcttccacctgagtagccggtccagagctgactgctggcgcatcctggagcattaccagtgggacctctcagctgccagccgctatgtcctggccaggccctgagctcagcttctgcgggcacagacaccagcatgaaaagcctaggcccctgagggcctggccacatgggaccaagcggaaccagaacaaggtcccgacaggggtagacgttccacctggggagatcccacctgccgtaggcacatggaggaggagcccagagttgggcactggcaaatgtctcctccctcccatgctccttggcttctgaaggctgaagctcctttggctgggccaagaaggatctagtctgcccactacattctcaaacaagaggacttggaagaaaagagctgctatacatcatatgcagaggaagcttctacgcgctagagaggatcaaggggccacactggaccatgtgaacagccatcctgaactgccatcagctaccacactggactctgcagggcagccatcctggatgatggaagccaccatattgacttggggtataggcccaaactgccttcgtttggtccagggccatcgtgggtgatgacgattgctctcttgcactcaaggacatttgatgctggtagtatggattatgagatggactagcccctgccccagcccagctctcacattcccctttgttttttcccataccaactgcttctaccctcccctattacatacatctttcaatgtccaaaaagttacaaagtttatatgaatgtaacatataaagatgcagcctttttcctagggcaagggaaggaagggcagttacataaggcacaggaatcgcagcaagcaccagctgaaggcagggccctagtgggagaggaagttggcactggggtccccctgcagctgttgatggggaggtagagaccccctcaaagtgccatggtctgaggctgaactaattggccaagcagatgctaggcagcggcgggggggcggtggctatatccaccgtctttggtgcagcttgcccttccacaccccagccctcttgtaaaaccccagagtcctgggttccagaggcctcctttggagcagaggccctggaagggggtgggagagagtgcatggggaaagtgtgaaagctgatatgcctgtgtgccgagggactgctgggacagtggtgggaggtagcaggagagcggctctcatacatacccctccttgggaaccacaggggcaggcggccagggagtagggtagggatggggccccccttctgtcccctgcagtgtacatggaggaaaggggctgcccagaggaggggccagggcaggtgaccatctggagttctggtcgaggtgatggtctcctcacaccatggtggcctctaactggtgacggcagagggcccagcgcctcctcgcttctcaaagaacatgtagtcctaagaggaggccactgtcaatgggagatccggctgggccagcccagcttggctgtcacaggccagctctagaacctcaacccccacaacacctattcctgactttcccctagcaagaggccaggaaatgcataaagcttcaaatgacagcaaaggacaggcaggaggtgggggcaggggcagccaactcacaatgaggaatgtggctcccagcagcacagccttcaccctcacatccaggtccagcgggaactgtaggccaaagtcatctgcatctgtgagggcttctcggaccaggcccccccactgcttgctgatgcggcccacactgcgggattcatcccgagtcttcacctgtcatcagggagggagaaaggacccagctgaggaggaggcagccagtctcacctgctccagtctcattcccacagtcgcacgtatgaatttgcagggtctccactcagtgaatcttcccctctaatggtcaccgagtgatcgctttcctaactggttcccatcacagagtatgacagctggggaaactgaggcactctagatcacgctgagtctatacccaaaattaggattcagactcagatctgctgctatcgaaaggcgacgcatgacataactgaacatcagtggtgggagaaatggaagcatgacaatccaacccccttagggtatggctgtttgctaggtttgctctggttcccaatgcccctgccacccacaattggcacagcttgtgccctacacaaagtaacctggccaaaagggcaaggaaagctactggaattctggctgtacttcaccagtcaagaaggctcctagaaggctatgtctaccccgaagagtaccttttctctaatctgcaaagtaggggagggccttgcccagcactgcatgagagcctcatctagagagggatacatgcctatctactgtggagagaggcagcagtaagtagcctttgaggaccacaatttccactggcttctctgagccacacagcaacaggctctgctgatgtgggtagttactccccgtgacttcctggtccttttcctgtgctcgttctccagtgattagaactgcagtgatttccttttgtgccattcccatccccttcctgcactgtcctacagctctggggcacttcctgccatggtcctaagggtacagccccaagtatggaccatttataattatgcaaaagggacactggccctatgagaaccccacagcctatacattcccatctggagatcacgcagttattatatcttattcccaattggttctcatcatggaatctccctctggctaccaaggtgactcatttttgcaaagtaaccttaggtagggtacctcattagaagcgttggaaagtctactggattatacctgttgtttctcccttatctgcacaagcaattatcccttaaagaactcaagggtcggtcaggtgcggtggctcacgcctgtaatcccagcactttgggaggctgaggtgggcggatcacctgaggtcaggagttcgagaccagcctgaccaacatggagaaacctcgtctctactaaaaatataaaattagccaggcatggcggcgcatgcctgtaatcctagctactcgggaggtttaggcaggagaattgcttgaacccgggaggcaaagactgcagtgagctgagatcatgccatagcactcccacctgggcaacaagagcaagactctgtctcaaaacaaacaaacaaaaaacaaacaaaaaaagaactcaagggtctgtggagtgcctttgtcttctagaaaccaaggtgcttcccaggcctcacctcactctgaaattcttgccacttgggatctctagcttccagactggtgacaggaatgcacagtgagaaggatatactggatttcggaatggcaggggcatttggattctattttagcagggcaggccacaggatgttaacatgttaaaatcgtgcttgctccagggcctgggctcacacactcatacacagcagccacatgggcccggcccacacagacttaatcgtccttcaccccaaatccaggctggccttagattttttttctgcccatctcagggccacttgtaataatcagcattgctccttaagatgaaatcctcgttgttatgcttttataagagcacagggccatcctatttccaaatggaggaatgctacaaatgcggtcggagtcacagtggatttggattgatgagctcagggtcttgaccttaatgttaactatcctgcctcatggaagcatcatcttggtttacgaaggtcccaagagcctctagtattcctgatacctcaaagttggtgtctgtgccacagccacaggtccagcagggccccaccactcgcaagactgtctggcgatcggcatcctggatggagaacttggggaggaagggatgccaggtctgtagcacgtggccaatggtggtgcctggtggagcctgtacttccatctgggagtgggaagcagacagggtcactgcggaggcaggggtcccagctctatcatctgtctatttggccctcactaaacctcccatccccacctgcccactcccacctgatccaggcctcatctcaggtggacctcatcattgtcccgccccaccaaggcccgccctcccggccccctccctccgcccacctcctggaggccacaggggcagcagctgcagccacagtgcagcgggcggagcaaacgcagcacctcacggtccccggggtcggccaggcggacacgcagcggccggcgggcgccacagcacagacgggcgcagcagttgctctcctcggccgcctgacccaggggctgcccggccccagagcgcagttcataccgattacaggtctcccagcctaggaacgctgcccgaggtgacacggggagactcgtagagcctcgcgcgcccaggagcccaccatccgggccaccatcatgaggtccaacctcccactccttctacttactttccactcgctcagccttctggtgaatcaaaatctgatcaatctggaaagagaggggcggcgcgcacatcagctggcccatctggacgcccaagtcccctcccagtcatcctccctccctccttcccactcacctgcaccaggaattcgaggccagaaggcacccctggcagtggcaagaagggggcagcagaccccaaggccacggggccaggcgaggggaagagggcgaagccgggagctggggcaggtacctgggcgggcactggcgcctgcccgggcccaggatgtagcgccggctccgggtacccaggggtgacagggtagggaggtgggggcgaaggggcgtagcctttggggggcaagtagcctgtaaagcggtgggagcaggatagattagaaagggactcaaggcctcatccccttattcctcagcccatgggccgcgaggcttcgggggaaacgtggtggcaagaggcagagaaagatggggcaggggagcagggtggaggttccccggaaggaagggaggggccccacccagccagtccgagcacattccgggaggatgtgttcaaacccggctcccaagtccgtgggggggataacggagacccccagacttgcgcgcacttacctgccatgggagaagggctggggttttcgagatgatggtgtctgggtggcttagttctggaagcggaggcaaactcggagatagccagacagacacagagacagacacaaagacggagaggcagctgcgcccggcgccggcccagggtctcttgggcggcgcctctgactcggggagaaacccaagtgtcagtgggcgggaccgggtacctgggaccctggattccctcgggggccccagaaccgccccctccctttgttctcccatcctgcggaggaggctgtgggccgacggcaggacagatggacccgcggtcagaccgacagccccaccccaagggcggtctccctgacccctctgtgcccccgctcacctggagcccccagaagagcccgggtgcctagcactcggcagctcacaggagctggcggaggcggaggcgggcccgagctcggaccccggccccgccccccgacccgccgagcccgccccctcctgggcggtgcgtttgcgccgggaggaaggcagccgtccgctgccccgggaagccgatcgtgggctttgctcctcggcgtcgccgacgttcccgccccttccgctcggactgcagatgcccagagagtaggagcgcctggagaaggcggcggctggtcccgggccccgcgaacgccgccaggccggcggcgtgcgtgctcagcgccctgggtgggaggcgagggcggcccgggccgcgctggcccctgggctcctcctcccaagggcagtcgggcctcgctgacgcagcggaacacccttcacactcactcattggcttccaggactggctcctggctcgccttctgcctcccaggggcgacctcgccgtcttctctccctggcacagcggtgacccacacgggcacctcgcagcgacagcagtttctgcaggtgccccagccacgcgggtgacaggccgccaaacggtgtcagtgagcgtgctcaggccgcctagagggccagaggaggaagcgcggtcagaaaagacccccgagatgagtgtcttcgactggatcctgagccaggaccagtcctgccttgggggccactggctgagtggcgcaagagatgagtttagaaacggagtgcagtccacatacagggcgggttgtgtggaagctgcgatttggccccacgagcagcgaggagtccaccgagacatttttagaacaaagaaggtcaaatgtgtgttttagaaagatcgtggcggggcgcggtggctcacgcctgtaattccagcactttgggaggccgaggtgggcggatcacctgaggtcaggagtttgagaccagcctggccaacatggcaaaaacccatctctactaaaaatacaaaaattagccgggtgtggtggcgggcgcctgtagtcccagctatgcaggaggctgaggtaggagaaactcttgaacccgggaggcagaggttgcagtgagccgagattacgccattgcactccagcctgggcaacagagcgagactccatctcaaaataaataaataaataaataaatatttatttagacatcaccaataaggcgaaggcatcaccaataaggcgatagttaggccgggcacggtggctcacgcctgtaatcccagcactttgggaggccgaggcaggcgaatcatgaggtcaggagatggagaccatcctggccaatatggtgaaaccccgtctctactaaaatacaaaaaaattagccaggtgtggtggcgggcgcttgtagtcccagctactcgggaggctgaggcaggggaatcgcttgaacctgggaggcagaggttgtagtgagctgagatcttgccactgcactccagcctggcgacaaagcaagactccgtctcaaaaaaaaaaaagaaagaaaagaaagaaagaaagaaagaagatgatagttgacccagaacctaaaggagatgagggactgagctgtgcagattactgggtaagtgtttcaggcagagggaacagcaagggcataggtcctgaggcagaagaccagtgagactggaatggagttaatgaggggaaggtcagaggggtcacaagaagccaggtcacgcatggccttttagtccactgaattataccctgagatgggaaatgttggagggtctggacagagaagagacgtgagacgtactgcagtggttctccatgtggaggttccccctgtgccctagatgccacctgaggtgaaggatggaaatgcagtgagagcactggactgggaggaaggagcctacagacccagccttggctctgccactggacctttgggtcactctggtttttctgtttttttgagagtctcactctgccacccaggctggagtgcagtggcgctatcttggctcactgcaacctccacctcccaggctcaagcaattcttctgcctcagcctcccaagcagccaggactacagccaccacacccggctaatttttgtatttttagtagagacagggtttctgcatgttggccaggccggtctggaactcttggcctcaagtgatccttacaccttggcctcccaaagtgttgggattacaggcatgagctactgcacccagcccctttgggccactctggaggtcccctctaagggtttgtttgtttgtttgtttgtttgtttattgagacagggtcttgctctgttgcccaggctggaatacagtggcatgatctccactcattacaacttctgtttcccaggatcaaggcatcctcccacctcagcctcccgagtacctgggactacaggcatgggccaccatgtccagctaatttttgtattttttgtagagatggggttttgccatgttgcccaggctggtcttcaactcctgggctccaacagtacacctgcctcagcctccgaaagtgctgagattacaggtgtgggccatcacacccagcatatttatttatttatttatgagactgaggtcttgctccgtcacccaggagggagtgcagtggcaccatcagagatcactgcagcctcaaactcctaggttcggccgggcacagtggctcacatctctaattccagtacttcacatctctaatcccactctgcccaggcaggcagagcactgaagatcaggagtttgagaccagcccggccaacacagtgaaaccccgtctccactaaaaatacaaaaaaattgcccaggcgtggttggcacatgcctgtaatcccagctactcaggaggctgaggcatgagaatcgcttgaacccgggaggcagaggctgcagcaagctgagattgcaccactgcattccagcctgggcaacagagcgagactacatctcaaacaaaaacaaaacaaaattcttaggctcaagctatcctcatgcctggggatcctcaagctgggactacaggcacatactaccacattattattattttattattattattattatttttgagatggagttttgctctcgttgcccaggctggagtgcaatggcctcccaggtttaagcgattctcctgcctcagcctcctgagtagctgggattacaggtgcctgccaccacacctagataatttttgtatttttagtagagacagcgtttcaccactttggccaggctgttcttgaactcctgacctcaggtcatccacctgcctcggcctcccaaagtgctgggatatttttatttttttagagacagcatctcactatgttgcccaggctgctcttgaacgcctgagctctagctattctcccactgtagcctcccaagtaactgggtagggggctgaagcaggaggattgcttgagcctagcagttcgagactagcctaggcagccgacatggtgagaccccatctcatctctttcttgaacctcctgggttcaagcaattctcctgcctcagcctcccgagtagctgggactacaggtgcgcaccaccataccctgataatttttgtatttttagtagagattgggtttcaccatgccggacaggctggtctcgaactcctgaacttgtgatctgcccgcctcggcctcccaaagtgttgggattacaggcatgagccaccgcacccggcaagaccccatctctacaaaaaagtaataattagctagtcgtggtagcttacacctgtagtcccagctactcgggaggccgaggtgagagaattgcttgaccctgggagatggagactgcagcgagtccttatggcaccactgcattacagctgggtgacaaagcgagaccctgtctcaaacaaaacgaaaaagcacagagaggcggtggaacagctggagggtggagggtgtgccccttcagatgtggaaggcctcaccaaggtgatcctattgaagctaaactaagcttgcacaaagtgtagaagtgtattctaggcacaaagaataactgcaaaacaggctgaaaagagcagctcaaaatcttgaggcagaagaaaatgtggtgggttggcaatgtggatgccatgtagtgacaaagaatcacaaagcccggatggccagtgcaggccttggagacagtggtatggcacttggaatctatttgcagtgcagtagtaagtaagtcattgaaaagtttaagtcactcttttttttttttttgagatggggtcttgctgtgttgcccaggctggagtatagtggctattcacaggcttgatcttagcacactagtctcaaactcctaacctcaagcaatccttctgcctcagcctcctgagtaggtgagactataggcacacaccaccgcacccagctatcatcatttttaatttctatttttgtgtatgctttatatagtacaatctgtataatatattgaaggcatacttaatttttctgaaggtatgcatttttttcttttttgagacaggtcttgctctgttgcccaggctggagagcagtgacacgatcttggctcactgcaacctccgcctcctgggttcaagcgatcctcgtgcctcagacacccaagtagttgggattacaagcaccatgcaccaccacgccagctaatttgtgtatttttagtagagacggcatttcaccatgttggccaggctcgtctcgaactcctggactcatgttatccacctgcctcagcctcccaggattacaggtgctgggactacaggcgtgagctgctgcgactggcctgaaggtatgctttttttttttttttttttttttttttttgagacagagtcttactctgtcgcctgggctggagtggtgcaatgacatgatcttggctcactgcaacctccgcctcctgggttcaagcgattctcctgcctcagcctcccgagtagctgggattacaggcacccaccactacgcccagctaattttttaaatttttagtagagacagggtttcaccatgttgcccagcctggtctcaaactcctgacctcttgatttgcatgcctcagcctcccaaagtgctgggattacaggtgtgagccactgtgccctgccggtatgcatttttaaaagtgtgcagattttttctctaatgagaagattttaggtaatttcatctcattccgtatctctagttacaatctgcatgcttttaattgcagaatttctatcaccaacactagtctctactgagctcccgactcctgtaacagcagctttccaggcttccctgaagcaagagagtgtgttagagacctgaaggaattcctaggggctggcctgaggattgtgagaaggatgacagggccaaatggtggagggccttgtgcggagatgttgtactgtcttctgagggcaaaggggagccaatgaagcatgtatatccagggagatggcataatttgaggtacactcgtagatcacaatatttcttcattttaaagatgagtcagaggccaggcacagtggctcatgtctgtaatcccagcactttgggaggccgaggcgggcggatcacctgaggtcgcgagtttgagattagcctgaccagcatgaagaaaccctgtctctactaaaaatacaaaatttgccgggcatggtggcgcatgcctgtaattccagctacttgggaggctgattcaggaaaattgctcgaacccaggaggcggacattgtagtgagccgagatcgcaccattgcactccagcctgggcaaccagcgaaactctgactcaaaaaaaaaaaaaaaaaaaaaaaagatgagtcaggaaccagacatgtgttcctccaaactcagcctcccgagtagctgggcctgcaggctacaggcacaagccactacacctggctatttttttttttttttttttttgagacggagtctggctctgtcgcccaggctggagtgcagtggcgccatcgcggctcactgcaagctccgcctcccgggttcacgccattctcctgcctcagcctcccgagtagctgggaccacaggttcccaccaccatgcccggctaatttttttgtatttttagtagagacaggggtttcactgtgttagccaggatggtctcgatctcctgacctcgtgatccacccgcctcagcctcccaaagtgctgggattacaggcatgagccaccgcacctggccatggctatttatttttatttttatttttatttattcatttatttattttttgagacggagtctcgctctgtcgcccaggctggagtgcagtggcactatctcggctcactgcaagctccgcctcctgggttcatgccattctcctgcctcagcctcatgccattctcctgcctcagcctcccgagtagctgggactacaggcgcccggcaccacgcccagctaatttttttttgtattttcaggagagacggggtttcaccgtgttagccaggatagtgtcgatctcctgaccttgtgatccgcccacctcggcctcccaaagtgctaggattacaggcgtgagccaccacgcctcgctatttttttatttttgtaaagacaggggtctccctgtgttatccaggctggtctcgaactcctgggctcgagcaatgttcccacgtccgccttccaaaatgttgggatcacaggcttgagccatcgcacagggtcctctctgttcctttcctttcagcatgcagcacaatttgtaatgatacatgttttgcaaattttataaatgtttagttatttcaggtccatttccactactagatgggaaactccttgagggaggggatatctgtctccctcagggttgatcttccttgtaacgtgtctgacgcatgatcaacactggtttaataaatactgtgcctgccaggagcagtggctcacacctgtaatgccagcactttggaaggctgaggcaggtggatcacttgaggtcgggagtttgagaccagcctggccaacatggcaaaaccccgtctctactaaaaatacaaaaattagccgggcgcggttgcgggcgcctgtaatcccagctactcgggaggctgaggcaggagaatcacttgaacccgggaggcggaggttgcagtgagctgagatcgtgccactgcactcctgcctgggtaacagggcaagactgcgtcacaataaataaatactgtccccactaaatatcttccagttctctacatgctgtgactgccactccagcctgtcctgccaccttttctcactcctttcctacctaactcaaactcagcccacattgaagactcctgcttctccaaacccctcccctctccatcttgttctttgttcattgtttcttccatacaatagagctcctttaaggatcatctcaagcattgtgacacattttctgatccccaatacatgatctgtccctgctttgaaccccaaagtattttgtaactaatgacactcctatcctgccttgccttaatcctcacttctagagtaagtgggtgctgataacaacagggctgaaaaccatgaccctatagtaattttttaaaatcccagtactttgggaggctgaggcgggtgaattgcttgaggtcaggagttcaagaccagcttcgccaatatggtgaaaccccatctctactaaaaatacaaaaattagccaggcatggtggcatgcacctataatctcagctacttgggaggctgaggcaggagaatcacttgaactcaggaggtggaggttgcagtgaaccaaaatcgcaccactgcactccagcctgggcaacagagtgaaactctgtctcaaaaaaataaaaataaaaataaaaacaggccgggcgtggtggctcatacctgtaatcacagcactttgggaggccaaggcaggcggatcacctgaggtcgggagttcaaaaccagccttgccaacatggcacaaccccgtgtctactaaaaatacaaaaaattagttgggcatggtggcaggcgcctgtaatcccagctattcaggaggccgaggcaggagaatcgcttgaacctgggaggcagaggttgcagtgagccgaggtcgcgccactgtattccagcctgggcgacagagcaagactccatctcaaaataataataataataataataaaattaaaaacctagtatgcatcagaaccacaagatgagcttattaaaatacagattctcaggcccgaaagagtgcttcagtaggaatctgtgttatttcaagcattctttatgactttgatgcccaccagggtaagaacattataataagttaacttaaagtgaccagaatccccagacctaaggctcactgattaagtcttaggaaatggagggagttcagaggttgaatccccacccttcgtcctccaagaggttagatgaacaaagactccaaagtttatttgcctttcctttttaatcctcttcttactccaactctttaaaaaaaaaactgcccagaaaacccagtaattaagcaaaagggagctcaaagagccaaggcaagccagcccaagagtagcagggtccctcccgcaggggccaaagtctggatgctggggtctccactcagagcctggtagtaaaagctggtgcagaataaggtcgttccggaagctagcaataacccagcctgaaggagacacagcacagaaaacaggattgttaagaacagggcaggctgagagggagtgtgtggggcttggtcagggttaggcgcagggaaagattacccagagtggctttctgcaatggggcacccctaacagggccaggctgtgtaagaagtggtgtttgttggccttgtcaaacagctgtaagaaaaacagaaacgaagggatgtcgtaggcaatacaggtactgagatcccctgatgacacaagggaccaaagttccttcccccaccccacccttgaagtcccagcttgatcccaggcctttggcttacagagcctttggcctttgctgctccagagatccgcggctcgccccaccctctccccgcccacttcccccagggaccccagactttgtgccttcgtagacccacgagtcagggagccccagcgcagttacttcacctccttcccgtaggcatctgggaattgggcgcctgtggagaaaagaagcaaaggttagcggtcctagtgccagccctgaccgcccccaatccggggggacccaggtggacattggcgagaaagggcacccccccccccgccccaggaagcttccgattggtgggaacacgctcgggcagtactgggaaccaattggacccagctgggggactttaaaaggtttagggctccgcggactgtctgataaacgagaggccgggcacctcccataggttacgcccttgcagcagaccccagaggacgccccaagtacagtcccatcttcgtccccagccccctgaccgtgcgccccgtaggaagcgaagcctaaggccgcagctccggacaaggcgcccaagcggcggaaagctgcagctggcccggccatagctgtagaacaggacgcaccggaccaacgccgcccaggccacccaagaggccagccaatcccgaccgcccatgcaaataaggttcacaggcgcccaatccgggccgtgttcatttcagcattgcgctcttcacccgcctttgtaaaaccgctgcagagtggcgaagacgtctggcgggcggagaaaccagcaccaattaggaacagaggagctaagcagtgggggggcggggttgagggcgggactagggggatttgcgtcaaggattggcccactttccaagttgatcgcctcttcgaaccccccacccccatgctccggccaatttccaaagatcccggtcttctctcaaagttccgcccctttttccacaggctcctcctgttcagcttcaaatcaaacccactaccaaaaagaggcggcccgaaagatagcaaagccccacctattgccagtaaaccccgcccactgcacaaatggcccctcccccatgtctgaaggctccgccttctttgtatgatgccccgccccctgtagttaagatattctcccccccgccagccctccgagaccgcgagagccccgagggtgggagatccgggggaatgtctccaccctgccctggcccgctacgtccatctgtccgtctgtccgctcccgcctcttcccaccatctccaatccccccattctccggagggcgggcgggcaggcgggtgcgagcggggggtgcgagcggggggtgtgcgccgctctctcggcagggggcgggggaggcggccgcgcggtgacgcgcggggctgctgcggctgctccgccggcggatcatcactctcgggctgggatggacgcggggcgggccggccctggcgcgcggagccaggagtccgggcctcccggctgctgagcgtccctcgaagcctcccctcacccccgccttccctcctaggatccgcgctgacccccgccccggggctctggactcggctcccgccctcctctgactccccggacctccccctcacgcccgccctcgggatcgactagatccctccccctccccgaggattccggctggatccctgcccctgcaccgcggatcctgcgctcccgggccccgggcccctggggattaacgtggactcctcctccagcacccgatccttaggatcctccgcctggaccgccttctggtccctcgaagccggcccacggaaccagcggatcctcaatctagtcctgtcccgttgccccctcctttctctatcgtccctactgcggggttccctgttctcgggctccccctgatcccatcccctagctctccttttcccggggatcgactggatcccggccccgccccccggggctggggcgatccccctcccccgccgggtgaggcgctgcgggcgggggctgggcctgcggggccgcgggggctcagaggccgccgccccctcccgaaggcctttcgccccccactcggagccctggatggaggcaccacggccccagggctgagccaggtaggacctaagccgggtcggtggagggggctgcgtggcggtccactggggtctccctctccccatctccctccctgcgcctggtttcccccagcctgctctgtctgcgtgtctccgcctagggatgctctcgccgtgtctctgcgtcttggtctctttgtctctgcctctctccagtccatgaatgatcctttgaatgggcccacagaccccgtgtgttcccatctccccctccccctccttctccccttcccagccaagccattttcaccactgcaggaagggggggcctgcggcctgagcccccgtccctcaactctccccggctgggggagtcaggcctgggcaggaatggagagagaaggcagagggatagggagaaggaggagggagcaagatgtggcagacagagatgaggagagaaaatgggggagacagtgatggggaaagacaggagagagagacagaaggcttaagggggaaatttggggaaggcatttggagagagagaaagaaatgagaaacaccaaggagagagatacagaagagaaagatgtaaaaagaccgagggtgagagactgaaggcaagagctggggcaagctggaagaggcccacaaaagatgctcccagggagcactacggagaggagagagatgggggggcctccagtgggagggaaggagggagcggagctggtgggaggaggccaggggcccagagtaccctcaagaggagagggtgactgaggcagatcttgttgtggggagggggagggggcagcaaggccatggtagctgagcccagtctggcacaggaaaaggagatcctgggggaatcagccccgagccacctccaggtgatggaggaatagaggagccttagagaagctgaaaggcagggggcatgactgggtgtgtgtggtaaggattcctgtgtcctcatctctggaataaattgacacctgcagagagccacccgcgggctggcgcctggctctgaaaaccccgcgtcagcaaacagctctggcggctggtgggggggcggggggggggcttgccgaaatgacctgggtgtctgcccctccggtctgatcttctcccttggctggcccctgctgccctgagcacccaggcatcagagcagcaactgtagggggggtggcaaggggaagggtaggtgaatggatgggttgggatgggaagagaagaaagctcagtgttgcccccaggacatgggtcacaatggcttgcaaagatgaaaaggtggtggggtccaaggttgcttgaaattgctggaggggggcagtcagtaggctcctgtgatgtctcttcaagcccacctcagcaccccctctcccaagccagaggcctggtcactaaggctaggctttgattggccaacaggcagggcttttagcgttcttggtgcccccaatctccccctcctctcaacatatatacttcttcctctatgttaaggttggggggaactcttgcattctgactcacgcctttgccctccccttcatgccctgaatggaccaccaaaccaagccagccccttcccgtcttcctccagaacccccctccagggttaaagctgcagcccgttgccgaggtaacattgcggggcagcatcccgtcacccggcaaccggctgcaggatcacgcatctgtccctggatttgcccctccagcgtcccctccctactctaaccccagcctcaaggtaccccaacttctgacggaggaaatggagagagtctggggagagaggggtcgcaggcagcacaaatccttagcgaatggtgtgttgaagtggggataaggtgctaggtttgtgcagtcccaagaaaggcctgagtctggcctggggtgggggttcagcgccatgaaattacagctcaggagtaattaacacatataaacaaacctgcctcttccagctaattaatgacttggtatttttgttttctcttccttgtctacctcattccctcccagggaggtgggagctgggactcctgagtccctgaggagaacctgcctgggagggatacatcagctggaagggagcatgctgggtctggagagctgacccgcctctcctctggctgggtcctggacttgaaccacatctgggccccacccccaacctaggcgtctgctgaggggagaagggctgctgggtgggagtggggaggtgtcagggggcctgtgggtgggagaagggggcaacttggtctgaattccaggtcactaaccacttgtctcttctgtttccccattcctttctgtctgccccatccaatttcccttgccctcttccacctctgtatttttctgtctgtccgtctgtctgtatcctgcctccctgcccctctcgctccaccccccgcaggtcgggcctgccttcaccttctcccatttccttccccttccccaccccgtgccccctccatggagaggaacagaccccttctctgtccagtctaacccaggtccctccccaaccccctcctccctcctttccccccgcccctcctccctcctggggcgaggggggcctccctccctctcccccccttctctctctctccgaggggggggggtcccagggagggagggggggtcccccgatcagcatgtggctcctggcgctgtgtctggtggggctggcgggggctcaacgcgggggagggggtcccggcggcggcgccccgggcggccccggcctgggcctcggcagcctcggcgaggagcgcttcccggtggtgaacacggcctacgggcgagtgcgcggtgtgcggcgcgagctcaacaacgagatcctgggccccgtcgtgcagttcttgggcgtgccctacgccacgccgcccctgggcgcccgccgcttccagccgcctgaggcgcccgcctcgtggcccggcgtgcgcaacgccaccaccctgccgcccgcctgcccgcagaacctgcacggggcgctgcccgccatcatgctgcctgtgtggttcaccgacaacttggaggcggccgccacctacgtgcagaaccagagcgaggactgcctgtacctcaacctctacgtgcccaccgaggacggtaagggcgcgggcacaaagccgggcaccccgtggacacagcccacaaacgcacatgcagaccctcaggcactggcaccgctctagggctcagagctgggcctttgtgggggcagtgagggacggagtgtccctgcaacctctacgtgccccctgaggattgtaagggtgcctccaggcagtcccaggcacacactctgcagacagcctctccataagttctttacgcccatggggggccatggtagggatggcaggcactggactaggctcacccactgtctccccaaagaggcacagtctgccagctaatctcaacctggccacggagggggaatcaggtgatccatcctctgctcagacacccactccaaccttgccccgcctcccgccgccagacctgggcttgttcctggcagaatacccaggttagctacatctgcaccccaaggacaacgcaggctctccctctccccctggctggtgagggctgccttccatctatcacatcatgtccagagccccttgcctgagctgagcaccttggcagtggtaccgatgtccttctcttctcccttgacccctgtacgcccctgaaggatcagggaagctccttgctgagggccagcacagcccacccgtcttccctggggctcttgaatttctgttcttaatgaactcttgttcactacaggactgctcatagcccctggcacattccttctggacagttctccaccctccatcctcagcactccaagactaatcagaacaccttccagagtgtgaacagggtgcaataggtggattccagccatctcagcagaccagcctcacaaacacccccctgcaccccgcatggctcttctgacacccatcttaccactccaaaacatggcagcgtctgcgtatagaccatccgctgccaccacgcttcccacagtccatgtttccagcaaccttacacataggcctggtacccaggagctcctaatgtaccctgtacatacccagcacctccacggcatgtgctcaagtcccaaaacagatggcaaatcccaactactccacaattaaatcatcacccaaccaacctgtacactgaccttgtgctccagcaccccacaatcacaattcccagtactttcatatcacacacacccccagtacatctctgaaactatgtaccatgtcacccacacacacctgtgctccccagcatccctggatatagatcacgtgccttaagaacatccacacatccagtaacctgcgcgcctgggccgtgtgctcagcaggcccctcacatcacagtccccaacatccccaacactcctcaatcattgtttaccccactcctacctagagatcatctgcaccggacctcaggtggtgaaaacacatccggcaagcttgcaccctactcaccaaacaagtactccaacaccatgccccctgcactcagaatccccccctgccaaacacggaacatctcatgcacctccacccacccatgtccatcccaatacctcgcaaatggaccattcaccctgtatcccccatcccagccatacccctctccatataaaccacgcctccccacaacccatacacacaatgcacagagcgtcatctactctaatcctattcaaatttgaagcaccctagttccccataagccatttatcccagtacatgccccacgtgccccccagtacaatgccctccacagaagagctgtgcacaccacactcctctgccatcccagcgcctgccccatcatgagtccttcacctcagcacctccatgtgggctgcccatcccagcactccctactctcacacaggctctgcacaccccagggccccctcatgggtgctgtctcgtcaccttccatgtgaaacatccacccagcacttgtcaccaatggactgtccaccccaacacctccacacagttgtccacccctgcccccacaccacccttgcccacaccttctgtatttttagccactgctgattgcagacctgcctggggcctgacacattcaggtgatctcactgaatcttcacaccagctctgggaggaagaggttgactcaggcgcgcgcgcgcacacacacacgcgcttcatagactcacgtgcacacgtgccttgctcactttgtccccaccccatcctctcacaaagaagaggccctgttcccagcgggtccccatggggccatcactgccacttaggagacgccttccagagcttgccttggccttgacccatccttggccttgacccacgtgccagtccctgtgccattgaggaaaaaccaatcagcctcggggaacccccaggcctctgggctccagctcgcccctgaccaaccccgtaatctggaagaagccctgacactgggcgaacctggtgctcccggtacctgctggcacctgtgtgccaggctggctcagggcactgtgttcctcgttccctatctgtggactgaaccacccgctcggccgttggggaaggggtgctttttggcagtggagcaggggcaggggaggcagcggctggtggccctggtgggaaattcaccattttggggggaggagaggaagcctgggtaagggacgaggttggggggagtgcggagggttgagctggagcggagggcaagacctgatgacccccttccctgctttgcccacactggggagctggggtgagaagccaggcctgtgagtgtggatagacgagaagtgctggtggtgaggctgggtagcgggcgggcagccccagctgaccttcccatagccctccagtggggagcggaaggcttctggggctgagctgtggggcaggctgccccccaaccctgtcctgctcgctgccctgcagagtggtccagagggaagcagagtcttttctgcggcagtctctcctccctacagccttgtggggggcggcaggcaggtgcttcgctggccctgaagggggccttctgagaggtggcctgggtggcaagctggccttggtctcccaggggctctgggtgggcttcccctcccctcccaccccacctctaacactgtttcatttccagcaattagcaaacacatcgacaagccaaaacctttccagccaagtcgatatgtcttaagacaggcctcagcccactcaggcaccccacccccccaaaaccagccttttctttggggcatgactttttctggggaggggaacaaaattgggttgtagaaacgtttttctcttttcttggtttctttttcttgcaaacaaattttgcttttttttggcttcttttttctgcctcccccaccctccccttttctgctttctctcctcccctccccatccaccacctccccccgacccccatctttccccacaaaattgtccttttttctctgttttgtgttcccggtcttaggtccgctcacaaaaaaacgtgacgaggcgacgctcaatccgccagacacaggtagatttaaaaatcccgctgctgcatgtggttgcttataagaggacattcatggccctgcccctcactaaatgtccccacagccctcaaggcccctcagtcgttctcccaactaaaatgaaaaagaaaagaaaagaaaaatgtttaataattggaaaaaagaattatgaaaacttcaaacgaaatttgaacaatgttggacccagtagaaaacctgccagaaaagctaaacatggtgaaaataagctgaaaaacaaaaagaaattggaatgtcagaaaaataaaattcaaaagaattggttaaaatgtttagaatttgaaagaaatctggacagttttgaaacttgtgaaatgtaacatttgaaaaaaccaatttgaaattggaacaaaacaacagttcaaaaaaaatttaaaagttggcaaattgatgacaccattgaaacatcagaagcctgtcgcaatttccaaaagcctgtcagacacagaaaacgcaaacattcgaagtgaattaaagaatttgacaattttttaaaacagggcccaatatcttgaagtttcaccacaaaattttgaaaaaaaaatgcaaagaatttttttctttttttcttttttcccaaaatggatctttttgttttttcttttcttgttgaatctgccccgagagcttcttgctttttggttgtttttttctttctttctttctttcttctttcttgatcctgtttttgttgttggttttgaattcttgtcgccccagcccctcttcctgctccttccctttctgacccctcctcccctcacactgggagaggggtggggtgaggatgggagaactgaggacaattaggacaggaccttggagggaaggagattccggcctgaaagtgctgggaggtcacttgaggttcaggagcaaaggagaggacaggatttgaggagaacccagcgagggtgctgcccacatagaagctctggcggaagcagtcaggagcatgggggctgcacagggggtcttagggatgggaggcaggaagctgtctgtgaggtcaaggagaatgtcttagtgacctgcaggttgaccttctggcaggagggatgtttctaccaggatgagggaggtgggcagagatgctggggaccagctgtggaggcccaggcctggctttggtttgctgagtatccaggctagcagggagggccagtgtcaagaaagaggagggcctgtgggccaggggtgaccccagccctagcactatggctgaatcatggggagctgcaggggaggatactgtagcctcggggaccctggcaagcactctcagactcccacatcctctggaattagtcacccttcagtccaatctggagcaactcaagggcctgatcacatgtggcagtgatcaggggatcctcagggggtatggcgggaaggagcccagtgcagaacccagggctcaggccagtttgggggtgtccaaaactaagctgcaccctggcttcattaagcaggctcttcctcctcctgccacagtaattaggctgggggttgccatggtgactggggaggtgacctagaaaggaattagggcggggaggagaccaagccccagggaccctaggcctggcacccctcacccacagaccagggaccctaggcctggcacccctcacccaccgaccagggtgccatgtggagtggaggcccaaggcctgagtcggaggagacaccaggaccctcccagcagctccagctccagttctagcctcgggagcttgctcttcccagggacaggaaggagatgtgctgtgtgcgggggtgctgggggttccctggatccagcagatgccctaaggagggccactgcccacccccagcctctacggggtttcttggaaagtctgcattggagaagtgccgcggggaaggctggcagagggtggggagggaatgtctgccagggctagctggggagggaggaggggaatccggtcttgccccccagggatgggagtgacatgtcccctgagctccaggccagtcctcagcaggcctgggagctgggcgctgctgcttccggtctgactgtgtccttgtccctgaccccctggcccacctgcccacccctccccacacagatatccgtgaccctgggaagaagcctgtgatgctgtttctccatggcggctcctacatggaggggaccggaaacatgttcgatggctcagtcctggctgcctatggcaacgtcattgtagccacgctcaactaccgtcttggggtgctcggtgagggtgggcagccaactctggggctcgggggagtctgggaggtgggcctggtgggcagggttcctccacatccagcagaatggcttctgggctggactgagctgcccagaaagggggcaggggcgctgtgacacctccagggagccctcttcttctctactcccaggttttctcagcaccggggaccaggctgcaaaaggcaactatgggctcctggaccagatccaggccctgcgctggctcagtgaaaacatcgcccactttgggggcgaccccgagcgtatcaccatctttggttccggggcaggggcctcctgcgtcaaccttctgatcctctcccaccattcagaaggtaccagcagtgtcccagcctgttccacccttcccaaccctgccaactcccccctctccttcaggccggtactcacagcctggcctgaggtctgcctgtcccgccagggctgttccagaaggccatcgcccagagtggcaccgccatttccagctggtctgtcaactaccagccgctcaagtacacgcggctgctggcagccaaggtgggctgtgaccgagaggacagcgctgaagctgtggagtgtctgcgccggaagccctcccgggagctggtggaccaggacgtgcagcctgcccggtatggggtgggagagggctgggtccaggccttcaaggttccaaggaggctgaggtgagaggtgcctgtgggcataccatttggcaaggagggatgggcttctggcccccagtaagtggcctcctcttgcaagccttccttcagtggaggtgctcaatcagagcaggtgagcacagggtgccatgaagtgctttgggatgacttccagagaggccagatctcccaaaggacccactggaggatttcaagtagggaagaagggtcttgcaggtagagggaagcatctgcgtgtgggcttagcaggccacaggccaagaggaggccagtgagcaggtggtgagaccctgaccccttctccccagctaccacatcgcctttgggcccgtggtggatggcgacgtggtccccgatgaccctgagatcctcatgcagcagggagaattcctcaactacgacatgctcatcggcgtcaaccagggagagggcctcaagttcgtggaggactctgcagagagcgaggacggtgtgtctgccagcgcctttgacttcactgtctccaactttgtggacaacctgtatggctacccggaaggcaaggatgtgcttcgggagaccatcaagtttatgtacacagactgggccgaccgggacaatggcgaaatgcgccgcaaaaccctgctggcgctctttactgaccaccaatgggtggcaccagctgtggccactgccaagctgcacgccgactaccagtctcccgtctacttttacaccttctaccaccactgccaggcggagggccggcctgagtgggcagatgcggcgcacggggatgaactgccctatgtctttggcgtgcccatggtgggtgccaccgacctcttcccctgtaacttctccaagaatgacgtcatgctcagtgccgtggtcatgacctactggaccaacttcgccaagactgggtgagggccagaggggctgggcggggctgggcggggccctccctccttcacatggccgccgttcctctgttaaggcactcactctggcctgccctcttgctcgagtgaaaccaacccagacacctctgtgccaggcacggagttgagcgttggagactcagcagtatcagacagagaagccgctgtcctttctggggagttgggggcccactcagtggctttggcttggcgtctgtctctccctcctccttgcctgatcccccctgcccgacccccctagggctctgcatctctggctgactgctcaggtgtgtgtgtctgagtgtgtgtaagagtttgtgtgtctctacttctgtctctgtctctctgaaaatccactgacagctctccacctccctctgctgctctcttttgtctgcttacttttcgctttctctggctgccggctgatttcagcctggctgtgtatctgtctctggctgtccctcccgtgtctttgaccctgtctgtgtttcattcaggctcagcttctgcttctccctggctatctctgtgtgtgtccctgcccctctgcccgcatttctggctgtctctgccagtctgtctccatccctatttgcctatttgcctgaagagacaggcagtttctctgtctcttcatatccatctgtgtctctctgcctctgtgactttttctctggctttcttgctgtccccctgtctctctgcatctctgtctgtctccctgcccactgccatccaccctccttcagagccttgccctcactcctcctttccctgccctcctgtgcccacagggaccccaaccagccggtgccgcaggataccaagttcatccacaccaagcccaatcgcttcgaggaggtggtgtggagcaaattcaacagcaaggagaagcagtatctgcacataggcctgaagccacgcgtgcgtgacaactaccgcgccaacaaggtggccttctggctggagctcgtgccccacctgcacaacctgcacacggagctcttcaccaccaccacgcgcctgcctccctacgccacgcgctggccgcctcgtccccccgctggcgccccgggcacacgccggcccccgccgcctgccaccctgcctcccgagcccgagcccgagcccggcccaagggcctatgaccgcttccccggggactcacgggactactccacggagctgagcgtcaccgtggccgtgggtgcctccctcctcttcctcaacatcctggcctttgctgccctctactacaagcgggaccggcggcaggagctgcggtgcaggcggcttagcccacctggcggctcaggctctggcgtgcctggtgggggccccctgctccccgccgcgggccgtgagctgccaccagaggaggagctggtgtcactgcagctgaagcggggtggtggcgtcggggcggaccctgccgaggctctgcgccctgcctgcccgcccgactacaccctggccctgcgccgggcaccggacgatgtgcctctcttggcccccggggccctgaccctgctgcccagtggcctggggccaccgccacccccaccgcccccctcccttcatcccttcgggcccttccccccgccccctcccaccgccaccagccacaacaacacgctaccccacccccactccaccactcgggtatagggggtgggtggggaggccctcctccccggccctccctggcccggccactccgaaggcagggaggaggacttggcaactggcttttctcctgtggagtcgtcacacgccatccagcagcgctaaggtggacatgggattcctccctgcgatgcgtgtctttcccacgcagagaagcccagtctcttctctggatctgggcctttgaacaactggggggcgttttctcccccccattgggacaccagtcttcggtgtgtggaatgtggtattttcccgcgtggaggtgtgctttctcacaacggggtgtgttttcccatgtgcagggtgaggtttttttttgccaccctggacacatgttggccccctcaaagaatttctgtggggatttgtaccccagaatcctgttcccccatcccttctcccacctcctcccctctccctccccctggagaccctggaagtggtgtgttcacatacagtgacccttggccaccagaccacagaggatggagcctgggaagcagcgaggaaatcacagccccctcgcccctgcctcccttgcccctaccccggcgaagcatgttccccccgacgccccccttggcacaagtcagatgaagcacgttctgccggggaggccctcaccttccagagaggacagacacagatttcctgctgggggagggaggagtccacgcatcctgatgctgcctggaagcttattttcccgtggccaggacgcatttctctgagtggaaacaggttcttgcatgtggatgtgtgtttccccaggcagacggcccctctcttcccagcacttccctgcctcccccaggcctcaggcccagcacccagttcctcctcacatggcaggtgagcacagacttctagttggcaggagctgaggagggtgaacaaaccccgagggaggcccggcccttgctcccgagttggggggagggggtgtggcaacgtgccccccgcagaggccacgcatgtttgaccaaagccctcattgtggtccgaggacagccttttccccaggcctcagagcattgctcatccgtgccaaactgggtaggtggatttgagcggaaagactcccaaaatgtgccaagaatttcccagtcccaggcagggcaggggaaactaagggcaagcaggatacagggcgagggatgtggcaggtgagggggctcccgcctgtgccccttctcctcaccatgtctcccccaccctgcctcagttctccgttccccttcatctccgtccccctctttgaagctgtccccatctcagtgtcagaccagccttctcctcagctgaccaccctcctctgacccacgccccctccttgtctgaaagaaaggagccttgaatggtggagggaggcagtggggagaaaggtctcaccggacaggttgggagaatgaggtcagcggtgctggggaacagatggagggggcagtggggacagggcttgggcagacaccagcaggaataatttgaaatgtgtgaggtgactccccggagggccttgggcttgggcatttgggaaaagaatgatgtctggaagggcttaagggacacagtggacgaggggagagtcctcatctgctggcattttgtggggtgttagtgccaaacttgaataggggctggggtgctgtcttccactgacacccaaatccagaatccctggtcttgagtccccagaactttgcctcttgactgtcccttctcttcctacctccatccatggaaaattagttattttctgatcctttcccctgcctggtctagctcctctccaaacagccatgccctccaaatgctagagacctgggccctgaaccctgtagacagatgccctcagaattggggcatgggaggggggctgggggaccccatgattcagccacggactccaatgcccagctcctctccccaaaacaatcccgacaatcccttatccctaccccaaccctttgcggctctgtacacatttttaaacctggcaaaagatgaagagaatattgtaaatataaaagtttaactgttggttgtgcctgctctgttgtggggagggcggtctctaaagaaacaagccctggggaagtgacgagggaggaggggtcttttcagtgaccagctctgaggtctgagaggaagggggagtgtgtgctggggtctggttgccatggtaatgggtctgtttggcaaatgaatgtcaggacccgtgtctatgccgagactggagcctggtgtcgttctataatggaaggacaaaggctgatgggggcagatgtcaaacaggccagaggcccagtgggctggtgtaggcagctagctcagcagaggtatgtgaggtgagaggcatggcctctgccaaggcctggactcaggcgagagggtcagccacgggtccaggactcagggtagccccttggcacactggaagggagtggcctggcaccattgtgacccgttcactcccaagaccctcagggacaggcaggcagtcagtggacactgtcggcacggtgggctgggggcgtaagggccccggtggtcctagggaccccatggccatggttgagcggccgaggcccgagtgggcctcgtatcacaactgcaacagcaacagctgccaggacctgggcaactctgtcctgttgctgctgggcctcatcatctgcattaacattagcatcaatatagtgaccctggtcagggtggggccagatgggagggagctggtgggatagtggggggcaggcctgccggccagggcctacctgggatcactgtgtcttcccccacctagctctggagccgattccgtggtgtcttataccaagtgttccatgataccatttgtgagaaaggtaagaggtctgggggctgggacataggaggggcagaaaccaagtgctctagcctcagccctaaattagccccttcccttcttgctcgcccctctcagacaacatagctgtgtggctgcccttcctgggccctgcctctccatgcctgtaggagctggcctccccactagtctcacctctcccccatccacagaagctcccaagtcatcattactcagaaagcagacccagccccctaagaagcagagttctcctgcagtccatcttcggtgcaccatggaccctgtgatgatgactgtgtccccgcccccagctcaccgccatcgccgtcgaggctctcccacacgctgtgctcactgcccagtagcttgggctcctgacactgatgacgagaagcctcatcagtacccagccatctgctcctaccactgggatgtccctgaggactgggaaggcttccaacacactcaggggacctgggttccctggtctcaggatgccccagagtcccctccccagaccatccgcttccagcctaccgtagaggaaaggcccctcaaaacaggcatatggtccgagctgggcctaagggcctatgtgtatcctgtgaaccccccacctcccagccctgaggctcctagccacaagaacggtggggagggggcggtgccagaggcagaggcggctcagtaccagcctgtcccagctcccaccctgggcccagcagtcatccctgaattttcccggcaccgctcctcaggccgaatagtgtatgatgcccgggacatgagacggcggcttcgggaactgacccgggaggtggaggccctgtccggctgctaccccctagcctctggatccagcactgccgaggagacaagcaagaattgggtgtaccgttccctaactgggaggtgactggaaaaaaataaaaaggagagaggaggtgatctgtggtggtgctggggtgccagggcccacacagcacctagaagctgtggctgtgaagagaatgctctccctagccacagggccctgagccctgaggaccctcattaaccttttgccccacaggcctgtccctgtcctcagcctttcctaggcccttctgggttccaaggctcttacctgcctctaccttgttttcaatttttttttttttttgagacagggtcttctctgttgcccgggctggagtgcagtggtgcaatcacagttcactgcagtcccaactgtctcccacctcagcctcctgagtcactaggactacaggcatgggccactagtttgttgttgttgttgttgtttgttcggttggttggtttttgtgtggggggggttgtttttgtttttaagacagagtcctattcttgtcacccacactggactgcaatggcacaatcttggctcactgcaacctctgcctcccaggttcaaccaattctcctgccttcagcctcctgagtagctgggactacaggcgtgtgccaccatgccctgctaatttttgtatttttagtgcagatggggttttgccatgtcggccaggctggtcttgaactcctgacctcaggtgatccgcccgcctcagcctcccaaagtgctgggataacaggtgtgagccaccccaccccagccgcaccactattttttgtagagattgggtttcactactttgcctaggctggtctcaaactcctgggctcaatcgatctgcctgcctcaacctctgaaagttctgggattacaggtgtgagccactgtgcccggactgtttcctccccctcccctgaggcagggtcttgatctgtcactcaggctggagggcagtggtgcaatcatggctcactggagactcaacctcctgagctcaagcagtcttcctgcctcagcctcctgagtagctgggacaacaggcaccaccacgcccagttaattccttgttttctttagtgcacagagaagcccctaaattctaccccaggtccccaggcagtcgtgcactagaggagagatctccatctccatggccctagctcctcagaaggctggtgcctgccagagcccagcgttaggctgcagccaccggtgaggcctggttcccacgtaagccctgatttatttggggagggatggctgagagggcgtctagtccttcacagttccccagtcaccctgaaggtcctatacccttaagcaggattggagcagaggaggaaatattggggcccccttggctgggcgcagtggctaacgcctgtaatcccagcactttgggaagccgaggcgggcggatcacgaggtcaggaggtcgagacctcttggctaacacagtgacaccccgtctctactaaaaaatgaaaaataaaaaataaaaaaattagctgggcatgatggtgggcgcctgtagtcccagctacttgggaggctgaggcaggagaatggtgtgaacgtgggaggcagaggttgcagttagccaagatggcgcccctgcaccccagcctgggcgacagagcgagactccatcaaaaaaaaaaaaaaaggccgggcgtggtggctcacatctgtaatcccagcattttgggaggccgaggcgggcagatcacaaggtcaggagattgagaccatcctggctaacatggtgaaaccccatctctactaaaaatatgaaaacaaaaaattagccgggcgtggtggtgggcgcctatagtcccagctacttgggaggctgaggcaggagaatggtgtgaacccaggaggcggagcttgcagtgagccgagattgcaccactacactccagcctgggcaacagagcgagactccatctcaaaaaaaaaaaaaaagaagagaaatattggggcccccctcaagaggtacctcactgtaacatcacagctctctgtgacctcactcctttgattaactcaccatgtcaccagtgaggagactaagttcagagaagctaagggtcttgctcatggttacacagacactgaggatcaagctcatggcctcagatgctccatcccattgctgcagagccagcctgacccaccagaacctcccaccttccccagttcaccatgtgaactcagaaactgagaaacagagaaactcaggccctgcctttctgctacacaattgggatcatatgcacatgcacacacataccacttgagaacaagcagctgtgtgcgtgagcccaggctgagggagctggacttcaccttccactctagacagattcctggaatgtgagcagacggaccgtttacaaatggccctacttctctcattcaactaacgttactgatcattttcaatggattccattcagtggaatctgaatctactctgcatctactctgtgtttggaggctggatgggatatgatcactggcctttctttctgctgagtggttcactgtgtaaacaaatggcttgcagtctccagggcaccacagaccccagtgatgcacctgttttaagtcaaacactctttttggtatattaacaattacatgtattttgtgctttgttaatttcatgtggttttcttgttgttgttgttgttgttgttgggttgtttgtttgttttgagacagtctcactctgtcacccaggccggacttctgtggcgcgatcttggctcgctgcaacctccacctctcaggttcaagcaattctcctgcctcagcctcccaagtagctgggattacaggcgcccaccaacatgcccagctaatttttgtgtttttagtagaggtttcgccatgttggccaggctggtctcaaactcctgacctcaggtggtccacctgcctgggattataggcgtgagccactgcgcccagcaagtttccttccttccttccttccttccttccttccttccttccttccttccttccttccttccttcctttcttgtttttttggagacagattctcgatgtgtcacccaagctggagtacaatggcgagagctcagcttgctgcaacctccacctcctgggttcaaatgattcttctgcctcagcctcccgagtagctgggactacaggcgcgcatcaccacacccagctaatttttgtatttttaatacagacggggtttcactatgttggccaggttggaactcctgacctcaggtgatccagccacctcagcctcccaaagtgctgggattataggcatgagccaccgcgcccagctcgggttttcttcaggtagtagcttaaccgtttttcaccttggagtaagggtgggttggtgggagtgtaggtggttaggttggagaaaccatggctggggttggttcccagcagaggcagccacctcagtgagtcagatgtcagtgtgacgaagtggctggtgggctcaaggaccaccaacacctagggctggagtctggccaggaagaattgggcagagatgggagctagaggacttttgacagggaaatgggcagagtagggaggggctggtacagcagggtgatgcctgaggggacgcagtgtcacccgcccatctagtcaccctagatgctggccccaaagtaaccatggggcaaggcacgccaacaggctatgtaagttgccataatgtctcaaaagaacaatgaaacaggacatatctgatgcatgcttcaaccctgtgacgaccgtgtcagcctctaactaccctatcttcagctcaggaaccagctgtggggttaagcaaacctcgtggagatagaggaacagactgagatctgggatatgtggggaccaggctccaccaagtaggagccaagggtggagatggcggtagaaggggccagcagaatggataaaagctgccacctccacattgtgactctcgctagctcacctcattgtgacctggctcccttaccagcttgtagttatctccggggattggcatgagtgcagtgtgggttggggccgggggtggggggcagaggggggtggcccaggtggccctaggaccccccctccatggaaaaccagctatggcataacaccgtgagatgttgcaatcaataccaagaaagcccccacgatgccgaggacatcttactcctgctgctgggcctcatcgttcttgtcaacattggcatcaacgtggcaactatggtcagtgatgattgtggactacctctgggggtgaacagggccaagggtgggagccagctgcagcctacatctccacctgcaggtgcggtctagattggggcgggggcaggggtggtggtgctgggcgcggagggcctggccttcactctcttccaccctgccccagatgtggcatggactccagaacgccttagacaagatgattgattgggctactcagaaaagtaagtgtggctgctggagaggtaggggacccccatccccacccctgacaatggccctagaaacccaggccccagtgttcccaaccttgagctcttctgacaattgccctgacttcatggactcttgccttccccagatgaaattcaggccagtgaaagtcccccaagtggtcccccagacaaggctcaggatgtccacatccactgcatcctggaccctgtgcaggtgaagatgtcccgacccacgcagtactcctctttctcctgccaccatttctccaaccatcacagtagcagtcttcttcgctgtgttcgtcgccgccgccgccgccaccgccgttgtcgccgtcgctgctgcaaccaccagcagcggccgcagaactacagacaaatcccccatagccactcagtcttccgtaacccacatcgcagccaaaagatgtcacaactacaccgagtgcctttctttgatcaggaggacccggattcctacctggaggaggaggacaacctgcccttcccgtatcccaagtacccacgtcgcggctggggcgggttttatcagagagcgggcctgccctccaatgtggggctgtggggccaccagggtggtatcctggccagtctgccaccaccctctctctacctgtcacctgagctgcgctgcatgcccaagcgtgtagaggccaggtctgagctgaggctgcagtcctatgggcgccacggttcccaatcccgactgtggggcaatgtggaggctgagcagtgggcctcgtctccaccacctccccaccggctgccccctaacccctcttgggtccccgtggggcacagcccttacccctcagtgggctggatgctgtatgactcctgggatcagcggcgtcgtggcacggagggctttgagcgcccccctgcctcggtgtcccggaacgcccggcctgaggcccagggctgccgggagcaccactccccacagtcccaccagcagagcctgcttggtcacgcctatggccagtcccaccgcagtccccacccatccacggaacccttgggctacagctcccaggacccccgtgaggtgcggcgtcgggcagctgactgggctgaggctctgcccgcctggcgtcctctgactacctctgcctccctcacggtgttggacgaggcctcccatcaacggaccccagctccaagctcagtgctggtcccccattcctcccagccctggcccaaagtccaggctgcggaccctgcccctcccccgaccatgtttgtcccactcagccggaatccagggggcaatgccaactaccaggtgtacgacagcctggagctgaagcggcaggtgcagaagagcagagccaggtccagctcactgccaccggcttccacctccaccttgaggccctctctgcacaggagccagaccgagaaactcaactgaccagcaggcggatgtggggtgtggggcagggcatggagggagaggaataaagagaaacagagtccaggaaacactgtggtggtctgtagcgtgggagtgccactccttcggccagcctgggtccctgcccttggcttcctgaaatgagaaaccagtgtccccttcttggtgtgaggcaccccttggcttagtggccacgcggctgccagcaggccctcctagtctgcaccatgcactacgtagctcttgcactggctgacgacaaccacccaggctctttattctccctgtttccagcaaggatcaggtctggattctgaactcagtgtcttgagtggagctctttgggatttacttagcacatggtacaggaccaggccaaggctctggattccagccatgccttccccaaggctctgaggcggaggtctccccagtctctggtgtggtcaagaggtaaaggattcaggattctgaaatgaaactgcaggagtggccgagtgcggtggctcacacctgtacagcactttaggaggccggatcacttgaggccaggagttcgggaccggcctggccaacatgatgaaaccctgtcttggtcgggcgtggtggctcacgcctgtaatcccagcactttgggaggctgaggtgggcagattacgaggtcaggagattgagaccatcctggctaacacggtgaaaccccgtctctactaaagaaatacaaaaaattagctgagtgtggtggtgggcacctgtagtcccagctactcgggaggctgaggcaggagaatcacttgaacccgggaggcagaggttgcagtgagctgagatcacaccactgcactccaacctgggtgacagagtgagactgcatctcaaaaaaaaaaaaagaaagaaaccccatctctacgaaaaatacaaaaattagccaggtgtcgtgcatgcctgtagtcccagctacaactatttgggaggctgaggcagagaatcgcttgaacctgggaagcggaggttgcagtgagccgaaatcgcaccactgcactccagcctggatgacagagcaagaatccatctcaaaaaaaaaaaaaaaaaggaagaaagaaagaaagaaactgcaggagtgatggaatgagagtgagtgagtcacccagcagtagagaacgatggagaaacaggagagggtcactggcttccagaccctgtttgcctgtccatacctggttactcaaacctggttaccagagagttccaccctgggccctcctcttcctcgacgttcctcattgtgaccctgaccacctgcctcattatgactcagtccaccccctccccaacaacaggagtcttgctcctagtgactgtgtgagggccgggggcctaggcagtcctgggaccccaggccatgggtgagcgagcctatcatggggcccaggtgtgctctggcaccaaccccaggaagtgccaggacttaggagactcgattcttcttcttctgggcagcttcatcttgctcaacgtgtggatcaatgtggtgactctggtcagggcaggatctgggtagcagggttgggggagccctggggtcttgaaggggctgaggtgggagggctgttggggtgtggccagataagagttggacttaggggctcaccctgcttccggactcacctgccctcccactcccttcagctctggaagcatctgaagagctccttgcggattcttttccgtcattttttccccaaaggtgagtgggcccctgtatgggctcccagggatatgggcctgtcccctttctcctatccctggcccagttcttagtccctagggaacccgggcattgtccccatcctacctctccctgcagacaagcagcccagcggcagccatcccatatgtatttgctcctccgtggatcccaagaacctgtgctcaaaagtctcttcccgcgtccatcctcgcccaggcttcctgctcaggcgcgttaaccaccttgactcctggataccagacacgaacgatgagaaggtttctgcgtgctgctgcgtgccccctaaatgtggacatgccggcgttcccagggagtctgcacggggactgtacaaggcggggatgatgggcgggggagaagcccctcaggtcacagcctcaaaggctcaagcctccttgctctccaggccagagacatcttcccagttcccaaagatgagcaagttggacacgggtccatgccacctgccccaagagagcaagactaagaccccagactgtgccccagccgaggccccagctcaggcccaggtccactccccaacccacactcctgtgtgcaccccaacccacccctggacccgctccacggaccacaccgctgtgcacacccctgcccactcctggacccactccaaagcccgcacccctgagggcacccactcccaggcccaggacacctcagcccaggcccaagcccacacctcagcccctaccccagctcagacgccagcccacatccaagctcacaccccagcccctacaccggccaaggcctcagctcacactaaagcccatacgtcagcccaggcccaaacccactctccgccccacacccctgagtatactcactcccaggcccacagccctgaacacacctcagcccactccccagcccaggctcctatgcctgtcccagcccacccccaggcccatgcccctgagtacacctcagcccatgccccagcgtatatcccagaccactctcatctagtccgcagctccgttcctgtcccaacctctgccccagctcctcccggaactcttgccccagccactactcctgtcctagctccaacaccagcccctgtcccagcctctgcccccagccctgctccagcactggtcatggccctgactaccactcctgtccctgatcctgtccctgccaccacccctgcccctatcataactcctataccctctaccccacctgccttcagccatgacctctccactggccatgtggtctatgatgcccgcagggaaaagcagaatttcttccatatgtccagcccccagaaccctgagtattcaagaaaagacttggctaccctcttcaggccccaagagggtcaggacctggtgagttctggcatatctgagcaaacaaagcaatgcagtggggatagtgccaagcttcctgcaggatccatactgggctacctggagttgaggaatatggaatggaagaactcagatgatgccaaagataagttcccccagaccaagacttccccttactgcagcttccatccttgcagttctgagaagaacacagactcccaggctccattctaccccaaattccttgcctactcccgggatactgcatgtgccaagacttgctttcattctgcaaccactgcccagagctcagtgtgcacccttcctccaccgttcactctttccctgcctctcgttcctcccagatcctttgtccctcctcaacccaccaaccatcagaggccttccaccttaatacaaacccctactgttcttccaacctccaagtctcctcagtccatcctcacttcccaattccccatcccttccctgttcgccaccatttcccaacccctgatccaaccccaatgccctgaatgtcatgagagtctaggccttacccaagattctggccttcaaaggaccccaggcccttcaaaagactccagagttcccaggaatctggaccttgcccaaaacccagacctctacaagaacccaggccttacccaagatccaggcctccacgagaacccaggtcttgctccaaatcaaggcctacatgagttcccaggccttccccaagattcttatctctgccagaatccaagcccttctcaagactttggtcttcacaagaattcaggcattactcaagattcccacccccaaaagaacacaggtctgactcaagaagctggtatccttaggagcccatgtctcacccaatcccctggcctccacaagaaaacaccatttacccaaacttctgatcttcagaggagctcaggctttacacaagactctggaatctataggaatcttgaaccaaaccaagagactgtgatctacaaaaatcaagatctctcccaagcaactgaccaccaaaagaacctaggctcttctaaagattctggaggtcacaagaatacaggcaatgtccaagatccaggagtctgtagtaccgcaggccttactgaagattctggatcacagaagggtccgtatgttccccaagactctgaagtcaataagagctcaggagttatccaggaatcttttctccacaagagcccaggccttgtccaaacctctggcctcccaaagtgctcaggccttacccaaaactcaggagactacaagaatccaggacttatccaagattgtggtggccacaaagttaaaggccttactcaagattccaacctcccaagccttacccaagccactaaagttgaaagaagatttagccttccccaagatgttggagtttacaggagctcagaacatagccaagactctaatctccacaagtgcccaggaattaatcaagatcctggcccccataaagacccagcccttgtccaagactctggcctccccaagatttcaggccttacccaggaatctggcccctacaagagctcatgcctcatcccagatcccagcctctacaagaacccaagccctgccctaggttctgattttgtccagcttttgtccctgcttcagaccccaaagtccacactgtccctgatgaagtcatctgtgcctgagaaggctgctcagaaggaggacgcacagcggcacgtcctctgggctcgtgtccaactcaatgagaactcctgcccttccaaggcccaagtggtctccaatgacctgcagaccttctcagaggtacctgtattaattgagctgcagtcatcctcctggcgggcaggcagccagcacggggcgtaccgccctgtggatacagttccttcaggctaccagaactatcgtcagatgtctatgcctacccatatcaactggaagtcccactgccctggaccaggcacccaggcagggcatgtggtttttgatgcccgtcagagacggttggcagtgggcaaggacaagtgtgaagctctgtctcctaggcgccttcatcaagaggcacccagcaactcggggaaaccatcaaggagtggggatatcagaatgtgatgagaaccttggacaaagaggggacaaaagtgcatcaggaataaagaggcgagagaaatgttctgtgtttgtttgaggacatccaccccagcccatccccgatactggccacccacaaagccactgaggacaggtccctgtttctcctccatagctgcatagctaagcccattatcctcaaggccctagagctcctctgtcccatacactagccattagccaaatgtggctattaaaatgtatattaggcctggtgcagtggcttacacctgtaatcccagcactttgggaggccgaggtgggcggatcacctgaggtcaggagttcgagaccagcctggccaacatggtgaaaccccgtctctataaaaatacaaaaattagccgggcatggtggtacacgcatgtaatcccagctattcgggaggctgaggcagggagaatcacttgaacctgggaggcggaagttgtggtgagccgagatcgcaccattgcactccagcctcggtgacacagcaagactctgtctcaaaaaaaaaaaaaaaaaaaaaagtagatgttactgcggaacacatttttaaattttgtttaattttaatttacattttctttttttctttttctttttttcttttttttgagacagagtctcgctctgtcacccaggctggagtgcaatggcgcgatctcggctcactgcaacctctgcctcccaggttcaagcaagcgattctcctgcctcagcctcctgagtagctgggattacatgcgtgcaccaccacgcccagctaatttttgtctttttagtagagatggggtttcaccatgttggccaggctagtctcgaactcctgacctcaagtgatccacccgcctcggcctcccaaagtgttgggattacaggcgtgagccagggcgcctggccacattatctacatttcaagtgctcaacagccacaggtggctgctggtggctactgtatcagacaggaccaactcaggacattgctatcgtcacagaaaattatattggagagccatgctttagagtttagaggaactattccttgtcacccattcttaacatcttcaaagcttccacagagtccagagaacttagttctttttagagtgcctcggaagccaccctctgggaaggaggtgagatgcagggatgtctgatgcctggttactccagactgtgagaaacagcccagtctccagttctcctgatctggcctcttgggtcacagccagatgtgtgtgtacgggaacctacttgcgcagttctgggctgctttggtgctctcgcttctcccagggaccccagctctggttgctgaaggagaaaactctctgtcagtgacgaggaacccctgagtcctgggcttgccaaattgatctctacagttggggagtctcttcttttacaggcctctaattttcctagatgtcctccttaattatcttatccatggacttaggcctatcccgtcctggagacagaccaagggcagaaggaatgtaagaagtcgtggcccaggccgggtgcagtggcgcgtgcctataatcccaacactttgggaggccgaggtgggaggatcacctgaggtcaggagttcaagaccagcctggccaacatggtgaaaccctgtctctactaaaaatacaaaaaattagccaggtatggtggcaggcgccgtaatcccagcttctcgggaggctgaggcaggagaactgcttgaacccgggaggtggaggttgcagtgagcggagattgcgccacagcactccagtctgggcaacagtgcgagactcagtctcaaaaacaaaacaaaacaaaacaaaaatttgagatcccaaagtgttttccctgccacgactcaggtagcagtgagctgaggtgggcatcactaacatgtatgtctctcctatgagtcaaacgtccatttctgggtcaccatctgtgtgctcctgcctaacactaccacttttgggattccaagatgcaccccccccaccccacccaggcaggggtccctatctctccccaggccctagggtggagtttcgctcttatcacccaggctggagtgcaatggcacaatctcagctcactgcaccctttccctcctaggttcaagtgattctcctgcctcagcctcctaagtagctgggattacaggcgtctgccaccacgcccggctaatttttgtatttttagtagagacagggtttcgcaatgttggccaggctggccttgaactcctgacctcaggtgattcacccgcctcagtctcccaaagtgctggggttacaggcgggagccaccgcgcccggcccatccctcattattttttgcgactcagagccatcctattacccctctcaaaccccaaggaatgtttgagtggggttgatatgggtgtgaaaagacacagaataatctgtctccagaggaactacaacttccatcaggcactacttcagcggaacaggaaaggatgtgggggcgtggctaccacgccctagtagagcgggaaactacaactcccaggataacgcgggatttcagcagggccaaaagagtgattgagctctgactggcgacccgacccggcggaaaccacctcgacagcctccagaaaggggcgtggctgaaaatgtaggggcgtggccacgtgggcatcaggaagaagtaacctgttgaatctatttctgctccccacccttactgcttcccataagggggaagccgcagactaataagcctcttccaaaaaagaggtaaagggaggtagacaaggggcggcagcggaggctggctactgcattccgtaggaggagccaacagttactttttacctgctgagtccggtgaaccagttcatgggggcggggacctgcctatgagaaaagggccaggatagaagaggtatttatttgttcattttgaggactaaatttagaacccatcatctacagacccatttgtaggttgtgtctggggcactcgctcggcctcaggaagagggaagaacggggacgactttgtggcagcaaagccacctcccttccgtgttttccgcagcccaaagcgatagaaccgcatggcttccgcagtctgggggagtgccccctggtggggcccgccgcccccggccccagctcggccgctcacggacatcgacttctgctccggggcgcagctgcaggaattgacccagctgatccaggagctgggtgtgcaggagagctggagtgacgggcccaagccgggagccgatctcctccgggccaaggactttgtcttctctttgcttggtaagtaaccctacttgcctttgggaactcacagctctcagcctcaccacgcccccgcccccgccccggctttgggcgacgccctcacgatccgttccctttttttaggtctagttcaccgccgggaccctcgctttcctccccaggcagagctcttgctgcttcgtggtgggattcgcgagggctccctggatctggggcatgcacccctgggtccctacgcccggggacctcactacgatgccggcttcacactcctagtgcccatgttttcactggacggcactgaactgcaactggacctggaatcctgttacgcacaggtctgcctcccagagatggtgtgcggaacccccatccgggagatgtggcaggattgcttaggacccccagtcccaggagcacgtgattcgatccaccgaacggagagcgaagaaagttccaaggactggcaaagctctgtagaccagccgcacagctacgtcactgagcacgaggcgccggtgtctttggaaaaatcgcctagtgacgtttcagcgtccgagtcgcctcagcatgacgtcgtcgaccttggctctaccgcacctttgaaaacaatgagtagtgacgtcaccaaggcagccgtcgaaagcccagtcccaaagccgtcggaggctcgggaagcgtggcccacattatgttccgcccaggtggctgcctggttctttgctacgctggcggcggtcgccgagtctctgatccctgtcccgggtgctccgcgtctggtgcacgcagctcgccacgcgggtttcaccaccgtcctcctggctacccctgagccccctcgccgcctcctgctcttcgacctgatcccagtggtgtccgtggcgggctggcccgagggggctcggagccactcgtgggccggtccgctggcctctgagtcggcttccttctacctggtgcccggtggcggcaccgagcggccgtgcgcctccgcctggcagctctgttttgcccgccaggagctggcgctcaaagcgcgcataccagcgccgctgctgcaggcgcacgcggcggcccaggcgctactgcgcccgctggtggccgggacccgggcggcggcgccctacctcctgcggacgctgctgtactgggcgtgcgagcggctgcctgcgctctacctggcgcggccagaaaatgcgggcgcctgctgcctcgggctgctagacgagctcggccgagtgctcgaggccgggacgttgcctcactattttctgaacggccgacagctccgtacgggggacgactccgctgcgctgctcggagaattggcccggctccgcggggacccggcccgggccctccgtgccgcggtggaggaggccaaagtggcccgcaaggggggcggtttggcgggcgtggggggcggggcccattaaagacgctgttcctaccagtggaaagtgcctctgtgggcgagcgggacgtggggggccctgctcgcccctcgccagggggactgactgtgtgccctgggcctgaagccccccttctggaagacctccctgttggttcctcctctacgcccacccgcctgcccccgcacaagttgccccattccagcctcgctattctccacatctgtggccagcactccgcccaggggcagcttccagaaaccgtctgtccccagttcttttggtcatttctcttaagggccaatagaaatgggagaaacatatttgctgaccaaacgcgaaaaggagttatggagaccagggtctgatcaatttggctcacacaacggcagagatatgaaggaggccggatttcgcccaaggctggatctcaccaccccccatcctccatctctccagttcttcccccactttactcgtgcggttctttcttcactaacatcccggccagtagggtctctctcccttctcccagcgtccgccattccatctcccttaggcccaacctctccttcctacccaggggtgcgttcaggaggccttcctgtccctcctcctctgaaggctgagacgtgcggccttgcctcggctttgcctgcttgtaagacacagtccgcactctctacctccaaggaaccccggggttcctcctgcccggcttcaccctcctatttcccagcgtctccgccccctgccccgcccccgggccggctctccgaggagggggaactgctgtcgccgccgccgccgccgcctcagcttcccacagccgctgccgctgccgccgctctgcctggtccagccaccggcccagtgctctgacttcgccggaccggggagctctgcagagacaccctcactccttcccgagggtccgggacgcctagccgggcgtggggggaagctccgtttgcgggggacagggagggaggagcctggagccgaagccagcgccacccgtcgccggatcaacaggacaggacaggttgaggggcgtcgggaaaaggaagagggggtgctataggcaatcccggggaggacgaggaagccctgtagcaggaagctgtgatccgctctgacttgtagggggcctgttcacatctggggactggtgacaacgtgggtgcactcctctcttggggggctggttagattggagggcgtgggatctaaacagcaccagctgtccccaagaaaatttaaggggcagccaggggagaaaaaaacaaaaacaaaaacaaacacggatgctcctcattttgaggtggcggaaggccctccagtcaactacctggtgtatccactaggaagggtggatttggaggtgacttcaaaaggagcggagggtgtgaaggtgaagaaagggtcttggccgctagaattctatgctactagacatgggggggacttggtgaaaaaggtattatccagccagagggtctgggagccctgtcttactgaacctgggcaacctggatattctgagacatattttggggggatttcagtgaaaaaagtgggggatcccctccatttagagtgtagcaaaggaaaaaacaccaaggttgggttccttcctgacattggcagtgccccagtaggggtgggatgagcgaatattcccaaagctaaagtcccacaccctgtagattacaagagtggatttggcaggagtgtgccccaaaatacagtggaaaggtgcctgaagatatttaaaccacgtcttggaaatttagtgggtcttggctttgggataggtgaagtgaggacagacactggagaggagggaaaggggacgttttcaataggaggcaaaactcgagggtgggatccactgaggagtacataggctgctggatctggtggagccagcactgggcccacgggtggtaactggctgctgtggaggggggtacgtgagggggggggtctggggcttatcctcaggtcctgtgggtggggcagcgagtcggggcctgagcgtcaagagcatgccctagtgagcgggctcctctgggggagcccagcgcgctccgggcgcctgccggtttgggggtgtctcctcccggggcgctatggcggcgctggccagtagcctgatccggcagaagcgggaggtccgcgagcccgggggcagccggccggtgtcggcgcagcggcgcgtgtgtccccgcggcaccaagtccctttgccagaagcagctcctcatcctgctgtccaaggtgcgactgtgcggggggcggcccgcgcggccggaccgcggcccgggtgagtgcggctggggcggggtctcccggccagaggtttctctgcctgggagattgaggccagggactctgaagaatagggcccggctgaggggctccccgaaagtggaagggggtgggccaggacgacaaagtccctgccagactgtgcctcagtttcccttctcttttgtccataacccggagtctccttattttcgaggtcaaggggaaggcttgaggggctgcctggcgccccgaaagcctcgtagttcctgctcgtccccccttcccaacacagcagtccccacccccatcgtcctccgcctacgtgccggttctcgcgattctttcaatctggagcggaggggcccgggggtttccagatgcctgggtcaccccaaggatttctgcagctccagccgcacgcccccccccagcccccgcctgccccggttctcccgctcctccacgcctgggctcggttcctcctggtcgagctctgctggctccgagccaatctccccagctctccctcgggtgtccttgcagctacctcgccagccagccctctatgcgccctcctcctgtgacctgcgcttcaagaacggagctgggcacccctcccataacccccgcgccactccgaaatcgggtcccgtaggctcaggggaccctacgctggcaggaactcagacacagttcacggctagagatgggcgccgactcgggggtcgtaccacctacaaggggggacagggaagtcggcagagagcaagcgatgggggaggagagttgtgagagttagaattggtccccgtccatgtacgacagtcagggagtccctctggccctgctcccgcccgctcccagctcccctaagggtagccacctcgcgccctcctccccgcgccaccggctgcccatagtggtacaatccgcagcccaccctctgagtaggaccgggcccccacgtgactcagcctgcctctccatctcctcagctcccaccccccatatccttggtaaggtcccccttaccccaggcgagttacctggccgaaggggagaggctgagcctcagggagaactgggcccccgggagccagcggactgacagacagacagacagacagacagatgggtcagtgtcagacaggccggcgctgggccaaggcaaggctctcgccaagctagcggcagccgcagcaggtgctgagtcagcgtcaggcccagtcccacccccactcctgagggagagcccctaccctgtggtcaatttgctgctgccaagatcccccaccttcgcaaacacgctgccccttcagtacccctgctggtctccctctgtccctgccttttgatatatctctcccctccctcctcccccactccttcccccttctggttgagctgtagggtaggaattaagccatttaaataaatttcaataaattacactgaaagctcctggttataggaaacagaagggacccacaccagctttcccaggagtgaaagagaggtgggagagagcgtgcttggaggataagagagctggggccctgggaccctcttccttcctttcattctcctttcttccctctaatcctgccaagtgtaggaatgtttctgggaacggagatgtcattttcaaagatgaatgtctctctctccagagcctcagctcaaaggcatcgtcaccaaactgttctgccgccagggtttctacctccaggcgaatcccgacggaagcatccagggcaccccagaggataccagctccttcagtgagaggggaagctggctgcagggtgggaagggggagaatggggacaggagatgacaatcctattccctcttcagcttctgttgccattgatccgtcttcctgacctctaagggaaaaagtggagctgggatgaggggagctcaggtgagggtcagaggcctgggtattgatgctccctctctccacctgcagcccacttcaacctgatccctgtgggcctccgtgtggtcaccatccagagcgccaagctgggtcactacatggccatgaatgctgagggactgctctacagttcggtgagacaatgaggctgagtggccgggaaatactggggactccccttcctcaatttgtcccttgagggaatgacaaccttcctcaactacagacattttgcccgggactcctccctccagctttgctgatggcctgtcatcgctgcccattccagaccagctcctctagggtctctccagtccccactccttgcacacccccaaaacagccccaggttctttgaatgtccaactctttctgccttttagggcccctacttcttatcccacctcctccagattttgtcattactcacttccctagagtcatccaggataggggatagtgagagactgggagtacagtggagagaaggaatcttattgcaagacccctaaaagtctagttcttttttttttttttaaatagtgacagggtcttgctatgttggccaggctggtctggaactcctgacctcaggtgatccacccgcctcggcctcccaaagtgttgggattataggcatgagccactgtgcttggcccagagcctagttcttagccctcagccctcttccttgtcctccctttgctcccaggtcctacatggactcagaagttgtcctccccctcccccaaaaaggatttgtgctttccatgagctcctttctgcccagtgatgtgtctttttatctctctgtctttgtgcgcctttctgggtctttgtctccttagccgcatttcacagctgagtgtcgctttaaggagtgtgtctttgagaattactacgtcctgtacgcctctgctctctaccgccagcgtcgttctggccgggcctggtacctcggcctggacaaggagggccaggtcatgaagggaaaccgagttaagaagaccaaggcagctgcccactttctgcccaagctcctggagggtgggtatagactcaagaaaatgtgggccacaggagagggtattgaccttgatatggacatttaggggcagacagctcaggctacaagtgataagaggaccctttgtgacagatcaagccaggaaggctttgccctttgggggtttgggtgcggtcctcctgtggggttggggttcttggagggtgaatgtacgggaagggagcccttttggagcactggttctgcctgggtccctctgtgcctaactctccttccctgctcctctctttctccccttcacagtggccatgtaccaggagccttctctccacagtgtccccgaggcctccccttccagtccccctgccccctgaaatgtagtccctggactggaggttccctgcactcccagtgagccagccaccaccacaacctgtctcccagtcctgctctcacccctgctgccacacacatgccctgagcagccaggtcccactaggtgctctaccctgagggagcctaggggctgactgtgacttccgaggctgctgagacccttagatctttgggcctaggagggagtcagagagggggatgtctgaagatggtcctggctgatcacttctttctttccacactcacacaacgccatgccttttcctgagatggcgctgggagttcccacatggacagccagggcataaacacttcccaccccggctcagccagttcctggagtcctgtgccccttttcattgccactgagccatttctagattcactggagctcaggattcatgtgtccttctttccctactctaccttctaccttggtctggacacattctggaacactggacaccctcgccagggccacttctgcactagggctctgtgctggaacccaggcatgctgccagccttttctctggatctgtcaggcctctgtcattgactcagatggacccctggtttccaagtagaaagaggctagatttgggccttgtctagctgttggctttggcctgaaccggaaccagtctcagatgaccacgggtttaaccttcttatcccagagacacccaattctagagctttatggagccgtacttccccctgaatcctagctctaggacatagatcatgactctcagcccttttacccaggatggagctggggcctgtatagccatattattgttctaagtaagttctagccccaccctcccgccttcttgagtgatacctattacggatgagttctggaaaagacccagctatgattcataaaaacacttctggatgaatcaagaaccatttcttgtttttcctagataattctctaaaaatatgattcttccatatagaatgctaagcttatttttacatgcagtttctagctccttcaacccagctgaggtcgtgccagggagacagagtctggagaagggcagaggaattttggaaggatccctggctcatagtagggaagctgggatgggggaggggtcaaaattatggcatgactgaacctgcatctgtgttgggtggacatgaatacttagctacctcagcaggaattccttccaggtcccctttaaagctgaggtccttagagtaatatgtccttaataaaaaggacaaatggatacagccttgaccctcccagtgaggagaccccaattcagcaataagtctcacccttctcccctacaggtcaggccaagaagggtgaaggcctcttgcactccagacctcatacgccccaacagcttctaattggatagaacttgctttaccttacagctcacaacctcagctgggttttaggtacccaaaaagggcctgtctagattttttcagaaaaacgtggagtgctaggggcagcctggaaaagatggggaacctgctagtgaactaggagggagacttccatagcctcagacttggatagggtaggctgagggggccctaagggagggactaaggctccaaggcaggtcacttttccttaggctgttctacttctggcttgttgcaagaggagtagatgccccctcacccacacaaaccccactcagtctccacccaactcctggcactgctcccaggggatcgggtctccactccagctttctcaattaaagacgatttatacaactgaagtgctgtctgtcatctgtcggtggcgggcttggcagttgctcgaggcaggatcaagtcccgggggcggggcgggtgggctggcggctgtcctccagcaacaggtgcacattcccgggctcctcgtcacttcccctgtgctggcggtcccagcggctctctgagcgaagtcactgagcgagccgccaggctatgaccccaggggctctgctgatgctgctgggggcgctgggggcgccgctcgccccaggtaagtgtaggccccgaaggggcagtgacggggccagcggtcgtggccaggcaccagggctgcacttattctctcctcccccaggcgtccgcggctcggaggcggagggtcgactccgggagaaacttttctctggctatgatagctccgtgcggccagcgcgggaggtgggagaccgtgtcagggtcagcgttggtctcatcctggcgcaactcatcagcctggtgagggcgcgcggggggtggaggtcaggccagccgaccggccgggggcgtggctttaggcaaggccggaccagggacaggctgggggcggggcctgggacgagaccaggctgagatggaccagcctttggtgaagattggatcgaaatcagaccaatggacaagctctggccgtgggtggtggacgggcctggagtagaactgggtagggtgaaggacggacctgtgatcggaccttaaagtggggctggggacgaggcaggggctgggggacggacctcgacgtagggccacatgagtcctgagtgcccagggtggggcggagcttggtgctcaggggtcaataaatggcagcgggtggaggttcggggctgggtggattatgagctgaaggcagggccggggacagagctaggcggagggctaggcaggggcgggtctggtaggttgataggctgggagtgtagacggcaggaagaggtgtttctgagatagaggcaggtcttaaactaacgccgcttctgggaggtggacttggacccgagaggatggggctcagaaaaagggggcggcgttcccaggagagaggttggccccccgagccccctcatttctctccaccctacttcacctttacgccttaaatttttcccttctagaacgagaaggatgaagagatgagcacaaaggtgtacttagacctggtatggagaccccacggggtgggaaagggcttccctctgccttgacaatttccttgaatatccagcccagtaagaatattttttacatcatgactttagataacacgtttataactgaagcaaaagctcgaagaaacaacacttaactttactacaggagttacaccccatgcatttttaattccaattttgtgtgtgtgtgtgtgtgtgtgtctgtgtgtgtgtgtgtgtgtgtgtgtgtgtgtgtgtgtgtgtgtgtgatgcggtctcactatgttgcacaggctgttcttgaatgcgggggctcgagccatccaccagcctcggggggaacctccacaagtgctgagattacagccgtgagccactgcacctggcccattctaatttttgaaacactggtttggggccgctaatttcattccccatccactaaaggattgcgaactgcagtttgaaaaccgttttagaggctagctactgcagcctcctcatttttacagagtaaaatattgaaacccggtgcgggggagggaaattagctgatgtggatcccagcgagtgaaggcggagccagagccagaaccacggccccttgacccacagtttatgcctgtcctgctccccttccttgcactcccttcctgggcttcctttggaaatcccaagtccctcccggcctccaacccggggcagcccctcagcctctgcttcactaggagtggactgactacaggctgagctgggaccctgcggagcacgacggcatcgattcgctccgcatcacggcggaatccgtgtggctccctgacgtggtgctactgaacaagtaggagaacttccaaagcccgggaggtggcgcggggcctcggggggcggggggcctccgggcgcggggcctgatccctgatgagatcccttctctgcagcaatgatgggaattttgacgtggctctggacattagcgtcgtggtgtcctccgacggctccgtgcgttggcaacccccgggcatctatcgcagcagctgcagcatccaggtttccggcctccacattggaagctgaaggagctcttacaaatcctccctttccttagacatcctgactccccggcgactcccatccttcatccttcccccattatctaatccccatgaccctcacctcgtctaccctcctggttttccattgagtgttctgtacactttctttgacttctagtcttactcagtgaccgccctccccatccctcccccattaatggcttcccttcataaccctccaattcctccatgatttcccttctctgtgccctccccaaagacctcccaaactccaccagcgctgactggttctctggcagctctagtgactctctcctccatccaggtcacctacttccccttcgactggcagaattgcactatggtgttcagctcctacagctacgacagctcggaggtcagcctgcagacaggcctgggtcctgacgggcaagggcatcaggaaatccacattcatgaagggactttcattggtgagtaggcatggctcctacatccatgggctctatcatttccagcttctaacagactcataaatatactgtcagtgatgcccaatatagccctgtggggtcagcaggatgggtatggctatctacattttaaaagtatggaaattgccgggggcagtggttcatgcctgcaatcccagtactttgggaagccgaggcgggcggatcatttgaggtctggagttcgtgaccagcctaacgtggtgaaaccccgtctctactaaaaatgcaaaaaattagccagtcatggtggcagatgcctgtaatcccagctacttgggaggttgaggcaggagaatcgcttgaacctgggaggtggaggttgcggtgagccgagatggcgccactgcactccagcttcggtaacagagtgaaagttcgtctcaaaaaaaaaaaaaaaaaaaaaaaaaaaagggcctggcgcagtggctcacgacttaatctcagtattttgggaggtggaggcgggcaaatcacctgaggtcaggagttcgagaccaccctggccaacatggtgaaaccccgtctctactaaaaatacaaaaaattagccaggtgtggtggtggacacctgtaatcccagctacttgggaggctgaggcaggagaatcacttgaacctgggaggcggaggttgcagtgagccgagatcacgccactgcactccaacctgggcaacaagagcaaaactctgtctcaaaataaataaataaaaatatggaaattgagacttgcccaagtttattagagatgggctactcagcccagttttcacagctagtttcatcaagtcagccctctcaggtctaggctgtggcagagcaagccatacctggcactaaccaggacagctctcacatctgtgttcccctccttctgctcatccccagagaatggccagtgggagattatccacaagccctctcggctaatccagcctccaggcgatcctaggggagggagggaaggacagcgccaggaagtcatcttctacctcatcatccgccgcaagcctctcttctacctggtcaacgtcattgccccatgcatcctcatcactcttctggccatcttcgtcttctacctgccaccagatgcaggtaatgggggaaggggctccttactcttttgtcattggctcagcttcttactctttatccttaatccaggcagggttttcctgccaatccaaagcatcatagattgggcttcagcaatcccgcccaggctctgcctcccgttgactgccacctttcctccgctcagtgaaactggaactctttcctaataggagtcctagcctctaatccataaagcctttactcctctgaaccacaaacctccaggcttagatagctctcccattccctttcccaacattccctgcccactttcagactcccactactcctttaatttttttttttttttttgagatggagtctcactctgtcacccagactggagtgcagtggtgcaatctcggctcactgcaagctctgcctcccgggttcacgccattctcctgcctcagcctcccgagtagctgggactacaggtgcccgccaccacgcccggctaattttttgtatttttagtagagacggagtttcaccgtgttagccagaatggtctcgatctcctgacctcatgatctgcccgcctcggcctcccaaagtgctgggattacagtcgtgagccacagggcccgacctttttttttttttttttttttttgagacagagtcttgctcttttgcccaggctggagtgcagtggtgtgatcatggcttgctacagcctcaaactcttgggctcaaacaatcctcccacctcagcctcctgtgtaactgagaccacaagcacccacaatcatgcccagctgatttttttgtatttttggtagagaaagggtttcaccatgttgcccagcctggtctgcaactcctgaactcaagcgatctgttcgcctcagcctcccaacgtactgggcttataggcatgagccaccgcgctcggcccccactagtcctttaacctcctatctccctgggaaatatataatagtaatagccaccgggcgcggtggctcacgcctgtaatcccagcactttgggaggccgaggtgggtggatcacgaggtcaggagattgagaccatcctggctaacatggtgatactctatgtctactaaaaacacaaaaaattagccaggtgtggtggcgggcgcctgtagtcccagctacttgggaggctgaggcaggagaatggcgtgaacccgggaggcggagcttgcagtgagccgacattgtgccactgaactccagcctgggagacagactctgtctcaaaaaataaataaataaataaataaataaataaataaataaataatagtaatagtcaacatatctttaggaggcagcaaaataggataacttttggcaaattccttaatctttttttttttttcgagacagagttttgccccgttgcccaggctggaatgcagtggcatgatcttggctcactgcaacctccacctcctgggttcaagcgattctcctgcttcagcctcctgagtagctgggattacaggtgcccaccaccatgcctgcctaatttttgtagttttagtagagatggggtttcactatgttggccaggctggtctcgaactcctgacctcagtgatccacctgcctcagcctcccaaagtgctaggattataggcatcagccaccacacctggccaaattccttaatccctatgtgtctcagtttcctgatctggaagtgggccaaccattgtccctaccgcctagaattattttgaggattgacagagttaatagaactatgcctggcacccagtaagttctatgtaagcactgggttttgggttgttttttgtttttcttttttgaacacttgctataaggtaattcatttaacatggtacatgtactaattctaaactttacaacaatcctgtgaggtaagtaacgaattgtcattctcattttacagtggaggataaagaggctgaaggagtttaagtcatttgcctgaaatcattacacagttagagaggggcagtgttgcaattccaacctgggtcagtggcagtctgattcagagacctgatatccttagctctggtattcaaaacatgctttcctcctctctgccatcaaatcctttgtctaaagaaggaaagcaggctgggcgtggtggctcacacctgtaatcccagcactttgggaggctggggctggtggatcacctgaggtcaggagtactcaagaaacagaaaggaggccagtagaactgaatgaagtaagcagaggggaaagcagtaggagatgaagtcaaggagctcatgggaaggacctatagaccataaccagctgcgtttcaaagggactctagacccaggaaggcccagaaccactgatgctgagtaacacccttggccttctggtctgagttgctatggccttgggcatgctagaacaggcaagtgagtttcactggggcatgtgttgggtggatgtttcaggttcttttcttttcttttcttttcttttttttttttttttttttgagacagagtcttgctctgtctcccaggctggcatgcagtggcgcgatctcggctcactgcaacctccacctcccaggttcaagcaattctcctgcctcagcctccctccccggtagccgggattacagacatgagccaccatgcctgagtaatttttctatttttagtagagatgggatttctccatgttggccaggctagtctcaaactcctgacctaaaatgatccacccgccttggcctcccacagtgctgggattacaggtgtaagccaccccgcccagcctgttatgttttttaacgttggtctttcggccaccaagagcccaggaaggccacatgcacagctctgccaggtgcagcccaggtgtccagggctctctggtccaggacaccatggcctggtgtgcccttatctccaggcctgaagccccacctgtccaacctggagacagctatgcaaggttctcttgccaggtgctgtttaatcttgggccctccagggcctggagcagcttccagggcccgtcctccatgcccccacccaaggacgtcctcactccagcaagctcagctacatgctcagcagtcagggccactgaggccacagccccgccgccacccacaccaggctgtcctagagggccaccccagccctggaagccccctcaacccctgctttcatgcaggagagggggagccactggaaggttctggaaagaggaataatatgatctgattctatttctttctttcctttttctttttttttttttttttagatacagtccctgtctgtcacccaggctggagtgcagtggcacgatcttggctcactgcaacctccgcctcccgggttcaagcgattattctgcctcagcctcccgagtagctgggattccagtcacacaccacgatgcccagctaaattttttgtaatttaagtagagatggggtttcgctatgttggccaggctggtctcgaacttctgacctcaggtgatctgaccgcctcagcctcccaaaatgctaggattacaggcatgagccaccgcacccagcttgatttatattttaacaaaatcagtctggctgctcggttgagaacagtcagcatgggagaaaaggatggagcaaagagaccagttaggagggctttacaataattcagacctaaggtaatgtgctttagagcaaggtggtgatgtaggaggtgggactcgactccagaccaaattgaggaccagctagaacaggaacagggcagatgcagctttccataagacatactcacgagtgtgccatgtcagtttaccattgccatggaaacacctgggagttaccacccctttggcaatcacctgatgacacagaagttactgccctttccctagaaatttctgcctaatccgttgcttaatctgcatgcaattaaacgtaggtataggccaggcgtggtggctcacgcctgtaatcccagcactttgggaggctaaggtgggcagatcccttaaggtcaggagttcaagaccagcctggccaacatggtgaaaccctgtctctactaaaaatacaaaaagttagccaagtgtggtgccatgcacctgtaatcccagctgctcgggaggctaagacaggagaactgcttgaacccaagaggcagaggttgcagtgagctgcaatcacgccactaaactccagcctgggtgacagagtgagagtctgtctaaaaataaataaatacataagagatagggaagactatcagaggagtagctttggtagtaagataatttagttttggacattttgttttattttgtttctgcttttgttttttgagatggagttttgctcttgatgcccaggctggagtgcaatggcacgatctcgactcactgcaacctctgcctcctgggttcgagtgattctcctgcctcagcctccctagtagctgggactacaggcacccaccaccatgcccagctaattttttgtatttttagtagagatggggtttcactatgttggccaggctggtctcgaacccctgacctcaggtgattcgcctgcctcggcctcgcaaagtgctgggattacgggtgtgagccactgtacccggctcagttttggacatgttaagcttgaaatatttattagacatccaactatccaagagaggttgagtaggcagatggatatatatctggcattcaggggagaagtccagggtggacatacaaatgtaggaatgatttacatgcagatggcccttccaaaagcctgtctttttttttttttttttttttttatgatggagttttgctctgttgctcaggctggaaggcagtggtgccatcacagctcactgcagcctccatcttccacactcaagcagtcctcccaactcagcctctcaaatagttgggaccacaagcatgcgccattgtgcctggctaatttttttttttttctttttgtagaggttgggcaaagtggctcacgcctgtaatcccaacagtttgggaggccaaggtgggtggatcacttgagctcaggagtttgagaccagcctgggtaacatggtgaaatcctgtctctacaaaaagtacaaaaattagctgggcatggtggcgtgcacctgtagtcccagctactcaggaggccgaggtgggaagaccacttgagcctgggaagtggaggtttcaatgagccattatcatgccactgcactccagcctgggtgacagagcaagacccagcctcaaatttgtttttgtagaaaagaggtctccctatgttgctcaggctggtctgaaactcctgggctcaagcaatcctcccaccttggcctcccaaagtgccaggactacaggtgtgaaccactgtgcctggctgtagaaatctgtctttgaatggcctggaaacatggtcactgattatgccatagagctttccttcaggcaagtctaatccttctctcttcccctctgccctccaaggagagaagatggggctctcaatctttgccctgctgacccttactgtgttcctgctgctgctggctgacaaagtacctgagacctcactatcagtacccattattatcaagtacctcatgtttaccatggtcctcgtcaccttctcagtcatccttagtgtcgtggttctcaacctgcaccaccgctcaccccacacccaccaaatgcccctttgggtccgtcaggtaagaaagatctcctcctccaaccccaattttccttttacagaccatagggagaactatagctatgtggcagagtgttgaagtgtccaagcttgttgagtgttgaaatgttgcacagttaagctagcccccatcattatcatttcacagatcccatactctcttcatcaatactgcccatctcgggtcccagggaaatattcttagggttaggtactatcagattggaagccctctctttccagttgggatacctcccaacccactaaatagcttttttttttttttttttttttttttgagatggagttttgttcttgtggccaggctggagtgcaatggcacaatctcagctcactgcaaccttcacctcccaggttccagcgattctcctgcctgagcctcccaagtagctgggattacaggcacccgccaccacgcccagctaatttttgtatttttagtagagagagggtttcaccatgttggccaggctggtcttgaactcctgacctcaggtgatccacctgccttggcttcccaaagtgctgcgattacaggcgtgagccaccgcgacaggcccaacccactaaagagctcttaggtctgtgtggctgcatttccttgtgtagctcgtttgtggaagaatatgcacgcacatactcacgcgcgggaatgggcatgtggagtggggtggttggctgtttcccttctggtctgaaagcatgaaagcccccaccaatacgcctcttctactctgcagatcttcattcacaaacttccgctgtacctgcgtctaaaaaggcccaaacccgagagagacctgatgccggagccccctcactgttcttctccaggaagtggctggggtcggggaacagatgaatatttcatccggaagccgccaagtgattttctcttccccaaacccaataggtaggactacgcccgttacccacataagagggagagggagaactacagttcccagaagagtgtgcggaagaagcggcccatgctctcggaagacgctgtggttgagcatcatgggagttgtagtactcctgctgctcactttgaggggaggtgggaactaaaacagaggcggtggaagaagttgcacaaggctagagagatcactgctggagggaaaagcatgatgggctctcgggttttgagaactggcaagttgttggaggcagctggagcggggcctgggtcgccggcactggctgtctttgcgtttgggcgtggccagtcactcctcttccaggttccagcctgaactgtctgcccctgatctgcggcgatttatcgatggtccaaaccgggctgtggccctgcttccggagctacgggaggtcgtctcctctatcagctacatcgctcgacagctgcaggaacaggaggaccacgatgcggtatgtccaacgggggtggaacaaggccaggtctaggcgaccttggccccacccccaaattccgcaccagcactcgctttcgttttttttgtgtggtttttttttggctttttttttttttttttttttttgagacagagtctcgctctgtcgcccaggctggagtgcagtggctcgatctcggctcactgcaacctccgcctacgggttcaagcgattgtcctgcctcagcctgccgagtagctgggacgacaggggcgcgccaccacgcctggctaatttttgtatttttagtagagacgtggcttcaccatgttggccaggctggtctgaaactcctgacctcaggtgatccgctcgcttcggcctcccaaagtgctgggattacaggcgtgagccaccgcgcccggcctcgctttcgtttctgattggacctctccctcatttggtcccaccccctgcttacctactggttctttatgcccatgcattgcctgcagtctcgctctcctgttggcgctgccggctgttgcctcaaaccagtggtaggaggactcaagcgggtagcgggcggggaaatgggggggtttccctgggggtctgggcccagagctcaggaagtttcctttgcctacccacagctgaaggaggactggcagtttgtggccatggtagtggaccgcctcttcctgtggactttcatcatcttcaccagcgttgggaccctagtcatcttcctggacgccacgtaccacttgccccctccagacccctttccttgaagactggagggttgagacccaggccccctgccagttgaagtgagagtttggtgatactgtcaagccctatccttctctgcctcttaactccttcacgaggaatctgggcctcttatttcgtttctggggactgcattggactgagggctgggtaggcaggtgtcttggacccacctgaaatgcagtatcatctgatttactctttgggatcttgaagaagctcttttgggtatcaacacctaggtcgccagtgaaatagaacacagaacaggaactagattataagccttatgaggtcaagaaatgtgacttggccgggcgcggtggctcacgcctgtaatcccagcactttgggaggccaaggcgggcggatcacctgaggtcgggagtttgagaccagcccgaccaacatggagaaaccctgtctctactaaaaatacaaaattagccaggtgtggtggtacatgcctgtaatcccagctactagggaggctgaggcaggagaatcactcgaacccgggaggcagaggttgcagtgagtcaagatcacgccattgcactccagcctgggcaacaagagcgaaactccatctcaaaaaaaaaaaagtgtcttgttcactgcagcatgcccagtgccacgcacaggtgctgacctatagtaagtgcttaacatttgttgaataggggaaagaaatttccggaagtaaatacagcaattaataatgtttataagctgggcatggtcgctcaggccagtaatcccagtgacttaggaggctgaggtgggaggattacttgaaacccacagtttgagaccagcctgggcaacatagtgagaccctgtctctaaaaaaataaaaatagaaataaagtagtgcttattgtttgcatgttgggtcttgtggtcgttttctttttacctttctgtaatttattatgttttgtaatgtgtactatctctgggattaaaaaaagttatttctacaagcatgcattggtaatgagaaaaaacaagcgttttgaaggccttcattcaagttccaaccttggtgctcacacaagccactagcttgctctgtacttgtttcgacatctgtaaaatgaaactaatgatagcatatgccctataggattgtctggggatcacaggagatgggaaaaaagcactatgcgatatgtatcagaggttgcaacggtgtgttttttgtttggcctgcacagttttaaatttgaactagttcactacttttattttttattttttttcaagacagagtctcgctgtgttgcccaggctggagtgcagtggcgggacctcggctcaccacaacctctgcctcccgggttcaagtgattctcctggctcagcctcctgagtacctgggactgcagacccacaccaccatgcccagctaatttttgtacttttagtagagatggggtttcactatgttggccaggctggtctagaactcctgacctcgtgatctgcccgcctcggcctcccaaagtgctgggattacaggcgtgagccatcacgcctggctactagttcactgcttttaaaatgtggatatttcatgagaaatttggcttcctggcttctcttgaaaataatcttatttaaaaaaaaactatagagacagggtctcactatgttgcccaggctggtcttgaacttctgagctcaagtgatccacctgccttggcctcccaaaatgctgggattacaggtatgagccatcacacccagcctcaaagataattttaaaaactatagtagtccgggcgtggtggtttatgcctgtaatcccagcactttgggaggctgaagcaggcagatcacgaagtcaggagttcgaaaccagcctgaccaacatgctgaaaccccgtctctactaaaaatacaaaaattagctggatgtggtggcgtgcacctgtaatcccagctactcaggagcctgaggcaggagaatcgcttgaacctgggaggtggaggttgcagcgagccaagatcgtgccactgcactccagcctgggcaacaagagcgaaactccatctcaaacaacaacaacaacaaaaaactatagtaacaccaggcctgattcccctgttggcaacaacttgtgtagagcttagtggctgccactctggtcaagttattcataccataattcctcaaagcccctgtaaacctgacccacgtcacttagtttacctgcccatccctccgtaacactagaaaagatacagggggcaacgaattgaagccaatggggaagccacaagtggaaaaagaaaggttgtgtctcttatggccatcacacattttatgcctcagttttctttcaatttggaaggaaggttagacctggtttaaggcagggccattttggacatagagatctcgcgcccagcaggttgtatgaactagactgttaatatttctggctggatgttgggccaaagtcagcttgagcctacagtcaacaagccctcactcaactactcaactgctggaagttgcgtccaaacagggagcattgggccacaactcacagggatccttgtgggacaaagttagcatgttcctttcccccagacccaccagccacgcaaataattgcacctggcatcccactgtggagcacagttcatttgtcttgttggtttattggcctacagagttggacacacacacaaatgcggagataaatattggtcagtttctctaaatctgggtcctcactacgtatagagctagtctgtagaattctaaattttgcgtgctgcggcacagaaccagtggccttctcactctgccaccacccgtcttcccagggaacatggggaaagagggcacgaactgacaagacttgatcattttcaaaagacaaaactgcaaaatcccaaatttccaacatctgaaactcacaatattcaaattccccagctcaaatacatatattttaatctccacgtcgccacaatctcatttgttgcccagaaccaccacattctggaagctattttccttgatcatatttaagaaaaaaaaaatgtctacaatctcaattctcccaaaaaaaaatgtccatggttttggaattttgacctattctgaagttccaattctccggtccatcctcaacccttccattttcccatgcctgtttgcctcagaggagtatgggttaaggatataggggcactgtcgtcacctctgcccctgcctccaggccttcctcagtctctcttgtggttccgctgtatagatagatagatatataatttgtgtgtagatatatatatatgtattctttattacgtatttttttgcagtttttctaaagtgccagaaacaagatttgtgggaatttttagtgatttttttttttgtgtgtttttccccatttgaaacctttcccccccttaaaaattggaacttggtacattcagtaggaaattcgtcactcaggctgtggccaagaccaagaaaagtgcaaagagacagaggaggaatgaaggagtgactcctctgtggttaacattcagggagcctgtctaaaacctccccttttgtatatgctgggagggtatgaggggtaggaggatggtcctggccctccctaaactcacctccctccaaaagccatgatcttgcccttggcagtgattgctgctagggcagccatcttggccccaaaaacagtagctggggaaaaggctgccattttgatgacagcaacttttccttttaaaactgcactcctctaattcccatttgtcaaatttgctcccccatactggctctccccttgtgagctattttttggggggaggtgggtgggatgggaaatatttatccaatcacagagcagggaggcccagttttcaaagagaattaggagcaaacatttatctcccccactggaaggaaatacagggaccctgaccagggttaactagtgcaaattagggattagggactatttaaagtccctgtaccccatccctaggctgggatctttgggtgtggggaactgagtcaaagatggggtgtaaggtgctattttgaagggaaagttggtggggataccccaaagcccaccagaagagtagaatggttcccccaaaaccatctggagtgattggtgaggggagtgacactggggagatgggaatacaggtaaggatggaaggtcatgtgcaaatcctgggcttacccacccatccgacccctatcatttttctggctatttggtctagtctgggagaaaccatcaggaaaaaaaaacagggagaaagtagattcccttctccatcccatatggagttcttccctcctggcccccaaatctggtctagcccagaataggccatatgtagaggcagaaagaggtgtgatctgcttacctcttttgccttggaagaatctggagctcactggatttgggggtcaagatagggccaatatttccctgccctggactgggaaagtgctcagccacagaacagaggggcagaggggcaaccctcccccaaacctccttgacctggcttgggagaggccatctccgaagtccaggaatatggggaggaacatggaagatccaaaggcatggaagctgaggaaggtgtcttgatacaagggaaacagggacgtagagacccacgctggggaaggatgaaacccaaagccacactcccaggtgggcggggtcaggtatcacaatggtctggtccaggccctgggccacaaagaatggaatgtgctaggaagcaactgggaagggcttagagaaagcttcagaacaaggcgggtcattaggtgagagagatggtttcccctaggtttacgaatcaggggagcaggttagacattcagagctggtgggggctgtgagtagagattcaggttaagtatattgctcagttgccccaagggctggagaagggatggaagctggccctgcccctcatggaggccattccctggaggaagactgagaggggaacctcgaaagatcccttcccaggagatgggaaaactacatctcacacaaagcagcctgacccctgagctccaggggcccccaagtccctgcacaagagtgtgaaggggctcccaaggggcagggaggccagggagctggtagtggtggggggttcagggagggtggcatctggtgaaagggggattgagccccagggttcaccccacatcgcccttctgggttctctcaacccctgccctttccccttctcccttagggggaattggtggaggaagagttgggggaggtggtgttggtggggcagggggtgctgcttgaggattcactgcgtagccaaagacccctggtaggaagggaagggcccccgcacccttctcatcaggtaggaccatgttgagagcaaccgggagagcggccaagttactgaagttgtaagggtaggcggcaaggagctgggggccatagacgagcgggtagggctcagggtagaaagtgactttggcagcccctatcccctccatccggtccccctcaccagcccccactggcccttcactcccagattttcccctgccaccgccaggttcccggccgcccccaatcaaggccagtggaaattcctgcacaggtgggtatacatagctgcccccgcttgccactactgggggctcctcaccccctgaaatgatagggtcctggagtgaggcggtctcggaagcttcctcagcagcagtgctcccgccacctgcctcaccgctggatgaggagacttgcatctcttggggggcttcctccttgacatccccgggcctggtgccagcgctgcccttggaataggcaatgacaggggttggggtgcccccgggccgctcagcagcatgcctctgcccgtggcggctcagggcagctgcggtcttgcacaccttggcgcagtgggggcaggtaaagcgggtggagggcctccgtccggcccgggagctgtgggagcccccaccgtgggcctcttggtgcttccgcagctttctcagggtggtgaaggtctgggcacagtccccgcatcggtgcctccgctctgtgcgggcacgtcccgctgggctctcggccgctggggtttcctcccagctcctccgttccagcttctgcctccaacgtggtggccggcggcctcggggcagcccactgccccccacactggcacctccagcagctccagccttgcgcttaggcttgtaggagtagtagggcctccagagctggtcctccccaccagcctttgattcctcctcatcctcctcctcctcctcttcgtcctcctcctcttcgtcctcctcactctcctccatctcctctccgctcagctccccaggacgcaggtcagtctctgagatgcggcgcttgacgatggcctcctcccctattcgcacagtgatctgacacagtggaggtggagcctgcagctgagaggggccccggccagcccctgtggggggacccccacctccaccaatcccgcccactggcttggctgtgtaagtcagagtccttccagcccgtggattccggcccttggcctcctccgtggtggtggccatggctggccctgcagcggtggctgggctgactgctgtggctgggctggtgggtgtggctgcaggctcagggggaggaggtgggtattctcgtttcttgggtggcctcgggggagcagtgtaagtgataaccgaggcagcttgggaccctcctgtgctggccgtcccactcccccctccaccactgctactgcccccatggacaatgacagagggggctgggtgggcaaaagtgatgacagagggtggagggccaggctctggggcaggtggaggcccaggcggcgggctggctggcattgccacaggggccggtgtgttgagggttggagaaaggggagcctccggggctccctggctgtaggtcttgtagggccgcttggctgcccgcatggggagcaggcggtagagcttgagtgtattgagcttgggcttgtagcctccattgggtgtcttctcactggcaaggaggcccgggctaatgccgtggaaggctcgctggtgggtcttcaggttatagtaagtgacaaaggtctcccaacagaagatgcactggtacctgggtcaggacagcagggaatagggcaggaacacaggcacttgagtcaagggccctgaagcctcccaggtcctcctacaccctgcactcaaacctgtgactcccgtagccttgtgctgcctccctcaccaggccagcctcagtgcagggtgcccgtctgagctcagtgcctccactggctgtgagactctaggcctcagctattccatctgggacgcagcctaactcacggagccttcttctcaagcccaaatggcagaatggggaaacgacttacgaacagggacaccacgtggaaacacaaggccctgctcggaatagtgtaatgactcccggacatgcctgtgctgccacagtcctttctggtgaggggagttttctctttccttctaggccttccccacagcagcaagccaggacatggcacaaagaggccctaacaaacctcagctgatgaaccctggaggtgaggttgcagtgagccaagattgcaccactgcactcccgcctgggcgacagagtgagactctgtcaaaaaaagaaaaaaaaaaaaaaaaaaaaacctcagctgaaggaactggggctggagggaggcagaccggtgagtggtggtgagcaggggcctcaggatggctttttttttaaattctcaaattgcttgtagaggctgagcgcagtggctcatccctgtactcccagcactttgggaggctgaggttggcgaatcacctgaggtcaggagttcaagaacagcttggccaacatggtgaaaccctgtctctactaaaaatacaaaaattagctgggcgtggtggcgcgcacctgtaatcccagatactcgggaagctgaggcaggagaatcgcttgaacccaggaggtagaggttgcactgagctgagattgcgccactgcactccagcctgggggacagagcgagactcggtcttaaaaaaaaaaaatgccgtcttaaaaaaaaaaaaatgccgccgggcgcggtggctcatgcctgtaatctcagcactttgggaggccaaggcgggtggatcacaaggtcaggaaatcgagaccatactggctaacacggtgaaaccccgtctctactaaaaatacaaaaaattagccgggcgtgatggcgggcgcctgtagtcccagctactcgggaggctgaggcaggagaatggcgtgaacctgggaagtggagcttgcagtgagccgagatcacgccactgcactccagcctgggcaacagggcgagactctgtctcaaaaaaaaaaaataaaaaaaatgccaggtgtggtggctcacgcctgtaatcccagcactttgggaggccaaggcgggcagatcacgaggtcaggagttcaagaccatcctgaccaacatgatgaaaccctgactctactaaaaatacaaaaaaaaattagctgggcatggtggcgcatgcctgtaatcccagctattcgggaggctgaggcagaattgcttgaactgggacctgggaggcggaggtggcagtgagccgagaaggcaccactgcactccagcctgggctacagagagaggctctgtctcaaaaaaaaaaaaaaaaagaaaaaaaaattgtttgtagagatggggtctctatgttgtccaggctcgtcccagactcctggccacaagcgatcctcccacctcagctaaccacagtgctgggattactgcagctagcctagtttcaggataactttctaggccccaagccccacccactgccgcccttgttcctatgaccgctgagtgccagcctccagccgctcccccgccagcctggatcactcacctgcgctcccccgtgtgccacacttcatgcttcgtgcggtactccgccagagcaaacactttctcacaatagcggcaggggtacttcctccgccacgagtgtacattgctgtgtctcttcagactggacagggtcacgtaggaacgctcgcaggccgcgcacacatacagcacgtggccgcccaccaccttcaccacgtgctcggggccccctcggaagcccactggtggaggcagggctgaggcgtccacccctgcaggaccaccagggccagcgcccccagctcccagccctgtagacccccgcgtgctggcccctcgtcggcactgggcctcatgggtctgcagccgtttgggatggatgaagctttttccacactgggggcaggggaggggccgccggggcagggagcactgcaagtcaggggcctgggcctcagccctgtcaccctcccactccccagctggcctgggcccgggcccaaagctgtcctcttcaggctgcgaggtggccatgggggctggggtaggaggtacccaggcatcacctccctcccccaggccctgaaggcgggagatgcccagacggcgccccaaagctccaatctctgctacagctgccccgtcccctccaccaccaggcagtgcgagccgggcgctgtagatgaagttgaggacatcagaaaacgcagctgctgggactcctggcaactccaggacccggggtggggaagaagcagggggagaggctggagggggagaggaagaggaagaggaagaagaagaagaagcagaggaggaagaagaggaagaagacgaggaagaggaggaggaggaagaggcagctgtggtggtggcagggttgggtgcggcgcccccagtagctggtggaaggggtagtggggctgaagtgagcagggcctctctgaagaagggacttgaagcagccaggacgctgcggtgagcagggaacttggtgtctccggctatgagggtgacgtcacagaagaggccacggagccgctgttcattgagctggcgcaggacggcgggggcatgggacgggtccgtcacctctgcaggggggggcatggtgccagcctagacagtgggagaagaggccgggtagagtctcagaggctgggcagagggcaggggcttctaaaatcaggcagagagaggatcaggagctgctggtcagaaactagtggaaggctgaatcacttctggtcacagaagtcaggggttggcccttagccacccaagtctggccagcatccaagaccagtatgtctaactcacttctgaggctggaagaggccagagatacctcaggtcatggtgaaggtcaaggggtcatgacctctgaagtcacagactagagatgtaagtgaggcaaatctctctcatgggaaggaggaggaagctccacaactcctgatagccatttcacagaactccccagcctagacaaaatggccgcccctgctggcctgctgccttgggtctactttgtcctcactgtaggcctctgggtaccttctcacctgagagcacagccaacatggagtggggcggggggtggctcagcgagtcccttctgctgggcctcttccttctgcggagaaacagaaattatgtcaggggaacctagaggaggagcagaagagggtcctcaaggagggaagtgagaggaaaagcccccaggaagtggggaggggtgcagtactgtggccagagaggacacctgggtgagcccagacccctccccggagcctctgccaggttatttgtttagctgtgtccagtcaaacctgggaggtcacgcagattattgcagagccttgttctgcgggcccagagaagtacagtgacaagataatttgcatattcccaattcacctccaaacaatatagtagcacaggtccagtccataggttcagggaagcctgtcacagcactctcaagtccctttggcccaatctccagggctcagaggaagtcaaagatttgcatgttgtcatttatcacaatggtctcatttacatatcaaaataatttgtgagtttttaaaaattggacctaagctggtagatattcaaattaggagaggacatcctcacatccttccagccccataaatcttagaagggggtttctggcgcagctgccaggcaaccattgaagaccactgacccatacacaactgccagcttgctccagcctctggagggcactggaaaggccacaagaccaggaggcctggtcccacgccttactcagagacctgatgccctagggatctggacttaaaaagcggcagaatcacaactcctacctcacctcttgctgggagactcgtccagagggaagagcaaggccaggcgcgggggctcacgcccgtaatcccagcagtttgggaggccaagaggggtggatcacctgaggtcaggagttcaagaccagcctgaccaacatggtgaaacccacatctctactaaaaatacaaaaaattagccgggcgtggtggcacgtgcctgtaatcccagctacttgggaggctgaggcaggagaatcacttgaacctgggagctggaggttgcagtgagacgaggtcacgccactgcactccagcctgggcaacaagagcaaaactccgtctcaaaaaaaaaccccccaaaaaacaaagggaagagcagacaactgaaacgcaagctcaggcagtcagcagcagagaaagcaccgcgcagccaccttcccctgcaggcaccatcagggccttgaagactcttttcagttgaaggtttgagttcaaaagccagacttatccaaagtcacacagcgctggtaatgacaggcggcacctatttagagatccaggcccgcagacttgagagcagagctctccggaccctctcctctgccctccacaaagcctgggagctgtcacccatctttgagggtgtccttccgtatgccgtgggccacgtgtcttcagaggtgtccggcatcaggagttcctcatacaattcccatcccctgaaaaatcttctttcccatttatcactcatactgtctggactcaaaggccttttccccacatataccccatttcacatcccccaaaatattttcctgacacctctcctggatgggaagaaggaagatggtaaacagggatgatattccaaagttttaacaaccctgtctgccagggactgatgaggttctgggtcaagtgttgccctgtcagttggtgaatttcaggtaggtcgtaggtcaggcatcctgcggaaggggcctcactgcattcacaggctgatgcccaggcctcctactcgcctccatgagaaccactggctcaccgggaccccaagagtcagtgttttatttggattacctcatttgttccttatcactaccctgaaaggtagcagttagctttccctccttttaaattttatttatttgttttgagatggagtctcgctctgcgcccagactggaatgcagtggtgcaatctcagctcactgcaacccccgcctcctaggttcaagcgattctccagcctcagcttcttgagtagctgggattacaggcgtccgccgccatgcctggctaattttttgtatttttagtagagacagggtttcaccgtgttagccagggtaatcttgatctcctgaccttgtgacctgcctacctaggcctcccaaagtgctgggattatgggcgtgagcctccatgcctggccactttccctctttaaggccgggcacggtggctcatgcccgtaatcccagcactttgggaggccaaggcgggcggatcatctgaggtcaggagttctagaccagcctggccaatgtggcgatctctactaaaaataataataaaaaaaaaattagccaggcatggtggtgggtgtctgtaatcccagatacttgggaggctgaggtaggagaattgctggaacccaggaagtagaggctgcagtgagccgagatcgcgctggatggagatcaatccaggctgggtgacagagtgagactctgtctcaaaaaataaaaataaaaataaataaaaaataggccgggcacggtggctcacacctgtaatcctagcagtttgggaggcagaggcgggtggatcgcgaggtcaagagattgagaccatcctgaaaaacatggtgaaaccctctctctactgaaaatacaaaaattagccggacgtggtggcaggcacctgtagtcccagctactcggtaggctggggcaggagaatcacttgaatccgggaggcggaggttgcagtgagccgagattgcgtcactgcactccagcctggtgacagaacgagactctgtctcaaaaaataaataaataaataaaatgacagaccatgggctgggtgcagtggctcacacttgtaatcccagcactttggaaggctgaggcaggtggatcccttgagctcaggagttcgagaccagcctgggcaagatggagaaacctggtctctacaaaaaatacaaaaattagccaggtgtggtggtgtgcacctatagttccagctactcaggaggctgaggtgggagcatcccttaagcccaggagttcaaggctgcagtgagttatgattatgccactgtactccagcctgagtgacagaacaagaccctgcctcaaaaaaataaaataggctgggcatggtggctcatgcctgtaatcccagcactttgggaggccgaggtggatggatcacctgaagttcaggagctcgagaccagcctggccaacatggtgaaacaccgtctctacttaaaatataaaaaattagcagggcatggaggtgggcacctataatcccagctactcaggaggctgaggcaggagaatcacttgaacccaggaggcaaaggttgcagtgagccgagattgcaccattgcactccagcttgggcaacaagaatgaaacttcgtctcaaaataaataaataaaatgtcagattatggcttatcaatgctaggtagctggcccaaggacgtatgaccagctagtagcagggctgggatctgatcccaggaagtttggctccaaagcctgtgttcctgatgacttcaccatatattaacgaaggacgtgtttatggcacccactagggcacaaatatcctacctgggtgcctttctgaaaattagaagcaaggttctttcctccaggaggtagcagccctgtgtaggtgggcaaagtcaagctttgcctccagtccccattcaccccactggctgggcctgccaacctgcacaaccatatgtggtgggctatgcatgtgtgaccgtgtgctgactaccacagtacttggacgagacctgtcagggcttcttagaactagagacacccaatgctggactggcccttaagatcacacacaatcattgtcatcatggtctctgtagctgccatttatgaaaaaaattttttttttttgagacagggtctcattctgttgcccaagctggagtgcagtggtgtgaacattgctcactgcagcctggacctcctggaatcaaatgatcctcctgcctcagcctccggagtatctgggaccataggcttatgtcacaatgcctggctaatttatttatttacttttgtagagatggggtcttgccacgttgcccaggcttgaaatacttatgatgtgcaaagtataatgctaagcattttatctgtatcatctcatttcaacactcaaaatggccagtgagacaacaggcttagagaaatcaaatactctaaactcctccctttcaggtagaaggtaggtagtgatggggttatttgcctctggttttgttgctagccaacccagcgtttggacgcagcttgagttaaactgccctatcctggctactgccctgcaaggccttataggaagtggaaaagactagctatgtgaccccaggcaggttacttaacctctctgtatctgtttctttgtccatacggtggggacaattaatagttcctaccttgtggggttgttgtaaagattaaatgagctaacaactggcaatatttagtttgtagaactcagtcctggaaaatggtggggagaagtagtgaagaaaaaaaggcacaaattgggcttcctggtaggtttggtggctctgtggttttagagttttttatttgtttgttcttaccatttctctactcttcagtgcctgtgtgacctcagatgtgccactgaggtggggatctgagcatggacaccagagacgccctacatcttgcggttccctctggctggaatgttctttcctccagatagcctcatgcagtgaaccccaacttcctttaagccttgacttagaagccaccttcccctgaggccttccctggccactccccaccttctaaaacttcctatctcccgaccctactttattttgctccttggcacttagtaacactttttcttttttttttttgagacacagtccagctctgtcgcccaggctggagtgcagtggtgcgatctgggctcactgcaacctccgcctcctgggttcaagcgattctcctgcctctgcctcccgagtagctgggattacaggcgcctgccaccacgtccggctaatttttgtatttttagtagagacgaggtttcaccatcttggccaggctgttcttgaaatcccaacctcgtgatccacctgccttggcctcccaaagggctgggattacaggcatgagccaccgcgcccagcctggctaatttttttgtatttttagtagaggtggggtttcaccatgctggcaaggctggttttgaactcctgaccttaagtgatctgcccgcctctgcctctccaagtgccaggattataggagtgagccactgcacctggccattctttttttttttttttttttttttttgagatgaggtctcactccgttgcccaggttggagtgcagtggcacaatcatggttcattgcagcctcaacctcccaggctctcatgacctcccacctcagcgtccctagtagctggcaccacaggtgcacaccacaatgcccagttaatttattttttatttttagtagagattggatctctctatgttggccaggctggtctcgaactcctgggctcaagtgatccttctgcctcggcctcccaaagtgctgggatgacatgcatgagccactgaaactggcccaactgcttctcttttttttttgcggcgggggacagagtctagctctgtcgcccaggctggagtgcagtggcacaatcttggctcactgcaacctccgcctcccgggttcaagagattctcctgcctcaacctcacgagtcactgggactataggcgcgcgccaccattttttttttttttttttttgagactgagtctcgctctgtcgcccaggctggagtgcagtggtgcgatcttggctcactgcaagctccgcctcccgggttcacgccattctcctgcctcagcctccggagtagctgggactacaggcacccaccaccactcccggctaatttttttttgtatttttagtagagacggggtttcaccatgttagccaggatggtctccatctcctgaccttgtgatctgcccacttcggcatcccaaagtgcagggattacaggcatgagccaccgcgcctggccaggcccggataatttttgtatttttagtagagatggggtttcaccatgtcggcctggctggtcttaaactcctgacctcaggtgatctgcccgcctcagcctcccaaagtgctgggattacagagcctggtcaattatttatctttttttgagacaggatcttgctctgttgcccaggctgcagtacaatggtgagattgaggctcactgcagccttaacctcctgggctcaaatgatcctctcacctgtcagccttctgagtagctgggactacaggtacctgccaccatgcccagataatttttgtattttttgtagagatgaggtttcaccatgttccccagggctggtattgaaatcctggtctcaagcaatccgcccagctcagcatcccaaagtgctgggatcatagtggaaagccactgcgcccagctcctatttcttatttatctctggaatgtaagctccaaggggtaaaaggtaggaatgtttttggttttgttttgtttttgagatggatggcatcttgctctgttgcccaggctggagtgcagtggcatgatctctctcggctcactgcaacctctgcctcctgggttcaagcaattttcctgcctcagcctcccaaaaacctggaactacaggcatatgccaccacacccggctaatttttatatttttagtagagacagggtttcaccatgttgaccaggctggtctcgaactcctgacctcaggtgatccacccgccttggcctccctcccaaagcgctggaattacaggcatgagccaccatggccagactttttttttttttgacatgaggtcttgctttgtcacccaggctgtagtgcagtggtgttaccacagctccctgcagccttgacctcccctaggctcaggtgattctctcattacagcctcccaagtagctgggactacgggcatatgccaccacgcccagcgaattttttgtatttttagtagagatagggcttcaccatgttgcccaggttggtctcgaactcctgggatcaagcaattcaccgccttggacacccaaagtgttggaattacaggtgtgagccacagcgcccggccaagggtagggaattttgtctgctttgttcattgccgtatctgaagtcgttagaatagggcctagcacgtaataggtggtaaaaacaaaacaaaaaaactggtaaatgaatgaacctgtcctcaaagtccatcctccaggatggaagccatcgtccacgctggactgagttggcctggagatagggatgacaattataacttgaccacttctgggccaggcacagtggcgcacacctgtaatcccagcactttgggaggctgaggcgggcagatcacttgaggtcaggagttccagaccagcctggccaacatgatgaaaccccatctgtactaaaaatacaaaaattagctgggtgtggtggtgcacgcttgtaaccccagctactcaggtggctgaggcaggagaattgcttgaaccggggaggtggcggttgcagcgagcagagattgcgccactgcattccagcctgggcgacagagtgagactctgcctcaaaaaaaaaaaaaaaaaaaaaaaaggccaggtatggccaactcacgcctgtaatcccagcactttgggaggccaaggcaggtggatcacctgaggtcagggattgaccacctgcctagccaacatggtgagaccagcctggccaacatggtgaaacttggtctctactgaaaataaaaaattagctgggcgtagtggcgggcgcctgtaaccccagctacccgggaggctgaggcaggagaatcacctgaacccggaaggcggaggttgcagtgagccaagatcatgccattgcattccagcctgggtaacaagagagaaattccgtctcaaaaaaaaattaaaagaaaccataaataagttgaccactctggagtcctcacaatttgcctcatactcttcttggggcctcacacacattacctcatttaatgatattctcagtacagccacccacaataggttttatattatcctgttgcccaggctggagcgcagtggcgtgatctcggctcactgcaacctccgtctcctgggttcaagcaattctcctgcctcagcctccagagtagctgggattccacgcccagctagtttttttatttttagtagagacagggtttctccatgttggccaggctggtcttgaactcctgacctcaggtgatccacctgccttggcttcccaaagttctgggattacaggcatgggccactgcgcccggccatattattctaattttacagaagaggaaaccgaggctcagagagggatataccttactcgaggtcgcacagcttgtaagcagcagtcaagattcgaatccaggcccagctgaccccagatgctcaatctttccctctgccatactgctagacctggccctgaagaggcctatggcccgccagctggttacataaaccaccgcacaaggtctcacgtgctaagtgctaaatgtgtcatgtctgactccaccctttccctcacttccacatccagcagtcatcaagtgtggctgaaatcgccgccgagcttgggaatggctctggaaatcttcccttcgatagctcaggtccttgttaacactcacgtggtccaaggttatggcctcccagctatcccctggcctccaggcttaccttcctccatccagccctcctccccctgagggtcaacgtccctaaccacagttcaggactatcactcctgggctcaaaacctccactggtccccactgactctagaagaaagttcaaattcttctaccaggcagtcaagggctctggtctagctccaatcttcctttttaatcttgccttgtgttatcctcttcaaacacacagtactcagcgtgagccaggcgtgatggcagatacccatagtcccagctactcaggaggctgcagctagaggattgcttgagcccaggagtttgagtccagcctgggcaatatattgagacccagtttctaaacaaatgaacaaaaccccagacacccagtgtgctctccagcttctacatgacccacaccttcatgcctttgcctgtgctggcttgttctgccagaaatgctctttccccaagcttgtcaaaatccctccaaaacgttaagatctgactccaaggccacctccttcttggccctccctgatccacaggatgagaacgatcattccttcctctgactcatcaaccttttgtgctcctatggccagcatccaccttacacagcagcagagactcaggttctcatgccctcagctggggatccctgagcatccgggtcttctgaaatggactgctgcaaatgctaagttctgcagcaactggggagaagagtgttggagggagttgcacagaaaggaccatccactgaatgttccagaaggcagcagagtacagtagttaagagcacaagatcttcaacctgattgcccgggttcaaatacagcttcacctcttactagctaagtgacttggggcagattacttaacttctctggacctcagctgcctcacttgaaaaagggaggtagagtgcctacttcagggtgttgttctgaggacagagtggccacatataagtgccctgaggacaggctggtgcacggtcagtgctaagcaagtgtgtgctgccattattatcagcgaagccccaagaagggaattcccagtcctgggggagggctgacaggggctggcataggcacagcccccagactatagccactttccgggtccgtttcccatgtgcttttggaagatacgcagggcagacaatcagccccattctgcagatgaggaactgagcttccttcagatcaagtgccagtgagggaatggtaaagacgccagagctcctcagccctggaccatggctcctttctcttcaccagaccgtcactgtgcacctgttgagcaggctcccacggcagccaccccttcccagccccccatgccggagggcctgtccgcagcaccctcccttcccccacgtacacacatccttccagtggggccgggcacagtagacagtggtgtgcaggcttggaatgcacttgcacacacacccctagaagggcccagtccccaaaggtgaggaaaacctgttctgaggaatctgcctagtgagcgaattctgttctgaggcccttccaccgtcgcaggagtggggcccagtgtgcgtcagagatacccacaaggggggcagagagagggagagggtgaagcaggaggaggctgaaaacttcacgtttcttttttccattttagtgacaagagtcacacccagcctttacataaacatggccaaggagcctctctgtctaagcttacttcccttgtggccgcccagcctctcctccgggtgaccctgacacgctgggcaggctcatgaggggcaaacatacagaccctgcaaagattagctgggccatctgacaacacccatgcctcccgccggcctccatgcgctaccctgcatttatctcccgccttcctcataccaaatcccctccgcagccccaccgccacttaagcacacagacggcaggcacgcacacacagcctgcttgcggctggcctcttgggtctgaggcccacactgcccttgtcacgccacctccctccccacatgtgttttctgaccagtttgcctcccagctcagcagcccagacaggctcctacaaacaacgtcacaaaagaatcctgtggagaatgttgcaaacacacaaccttcccctcgcttggctgcccatgatcccataaacacaactggcgcattccacctcgagcccctcacaccagtgccaactgacccacaggcccctgagacataccccggggttcctcgctcctctcatgatctttgggatctgagttctagacgcgcagcccccatgcaacgcgctcatcacagacacgcaaacccatccatcgccctcttcaccactggaccacacctcagcagggccacagaaatgggacccagacgtgacgccttctgactcaaaggcccacaaccgccccctccaaaagggcacatacactgcatcctggcaccctccgcaacacatacagcatgccagctctgcagaaaacagttcataaacaggtcataggtgcagcacaagacacacatgcgagaaaacacatgctgtagaaaacatacagccccacatcgaacaaactctgcacccagcatgctgtgccctgctcagaatacccatctgtcacccaaagccacagggctcgtcttgtaactctgccccacaacactggacacccttcctggctttctatctccatggcccagggagggccctacccagacccctggctgccagcaaacggtggtgcccaggagaggtttaccttgccccaccacacagcacaagacacacgatctccaagactcacagccacaaccctgccccgacggcgcggcggttccggggccccagctcgccctgcgcaccccgcacaccccaactctggggcgctcggcggcccacccctccccctctctgcctggctcctacgccatcaccctcccagcagcttgcagcgcttgcccgggctcacacccgccccaccccacccccaatctgccccacggggggagggggccattaggctgcagaattaacccttcaaagagggagtgagcacctccccttccacggccccaggcgatcgcgtcccacggccgcccctcgctcggacgccataccagggcccccttagtcgccccccagcgtcgtgcgcgcccgggggcggggccaggctcagcccccgacccctgcgcccccaggtcaaccccaaaggagagcggtctgggcgcggggcgcggtcggggctcccgcagcgccgggcagcggagagggggcctggcagttggctccggtccgccctggccctgcccagttcgccccagggcccacctgactgcgatggcgccgcgtccgccaggcccggctcatcaccgtggccgcccccggccgctccggttttgcccgcctccagctccggctccggctccagctccggccctggcccccccagcgcctggccccggcccggccccgctgccgccgccgccgccgccgctgacatcatcggctccccccgccccggtcctacccccacccccacccccggaaacagtccccccccagcgccgccgccgccgccgccgagaggaggccggcgcagcgcagccgacaccgacacaaagctccgagcgcccgacggccttccccaggactgacccccgcggcatgacactgcgccgcgctgggccaccgggcgggtggacaccgagcggggcgcgggccgggctgcagcatcccggcaggggcgcaagaccaccgacccccagggaaagggctccctccgcccttcctcctgcacgcccttcactcagcggtgcacactgcctgaaagcataacacacaggctctcagggtgcagacatgacatggcagactcataatcaggcccggtgggactcacagacccagggtcggcacactcaaagagggccagccctggacacacacacacaccctctccaggaatgcgcaggaaagctcagcaggccgcggaaaaagaaggccctggccctgcatacggggcacacacgaacgaccaccagcgcaaatgaacacatgaagctggctgggtactttgtccccaccagcagatagatccacatctgtatacttgaacataaatgcagaggccttggtgtcggcctctggggacagcatcaacaaaacaccaggtggaagcacacacagaaaaaacacattcctgaaactccacagggacaatcccaagaactcctccctggtgctggaaaattaaaaactaaggagatggaggagccagggttcacagctccttgccttaaaacctctctgaggctgggcgcggtggctcacgcctgtaatcccagcactttgggaggccgaggtgggcggatcacgaggtcaggagatcgagaccatcctggctaacacggtgaaaccctgtctctactaaaaatacaaaaaaattagccgggcgtggtggcgggcgcctgtggtcccagctactcgggaggctgaggcaggagaatggcgtgaacctgggaggcggagcttgcagtgagccgagatctcgccactgcactccagcctgggcgacagagacagactccgtctcaaaaaaaaaacaacaacaaaaaaacctctctgaaaccatgcaagatataaataaacaaattaatgtaaagccacagagctagccataaaaagaataaaagaatcagacaaactttggagtcatggagacataaatagaaaagaagcagagttgggctgggcacggtggctcatgcctgtaattccaccactttgggaggcggggggtggtggggtggatcacttgaggtaaggagttcaagaccagcatggccaacatggagaaaccccatctctacgaaaaataaaaaattagcggggtgtggtggcacatgcctgtaatcccaggtacttgggaggatgaggtaggagaattgcttgaacccaggaggtggaggttgcggtgagccgagattgcacgcaccactgcactccagcctgggcaagaagagcaaaactccgtcccaaaaaaaaaaaaaaaaattagccaggtgtagtggcacattcttgtaatcccagctacttgggaggctgaggcaggagaatcgcttgaatctgggaggtggaggttgcagtgagatgagatcacaccattgcactccagcctggataacaagagtggaaacttcgtcgcaaacaaaaaaagaaagaaagaaagaaaagaagcagagttggactcagcgggaaaataggcgtgctaccacctcaggagagttccagggaagaaccccacccccactccaaccatgtcacaatggctggagctctgaggggcccaggctccctgagccaggaggagaggagaaagtccaaggaaagatggtgagtgtgggggccaggggcctagtactccctccctatagctcctggttgctccatttcccctcctttcctaaaacttagctgtctcagagatacccacaaatagaattcataatggtgtacccagatgtctctggaacctgtggcatcatacagatgcatagcatctgaggcttcctccccttcctcaatccgagagagcatcctgggtcctttttctcctcccaggaacaacttacccagggaaacgatgctccaggactgctcactccttgcttcctgctccaggcccacattataacatctcactcatcttttaggccctttctagctccgaagagttcctcagcaagatagcccaacactgtacagtcccacagggtcccagaccccatcctggcatctgccctgccccaggtcgcctgggctgcggctgctgtctaccctgagctcctttctccctaacaggctggcagtcacccctacttgaacccgcctgactccacacacccatcgccgccctccgctccacccagcctccgctggcaccagtgctgccagccctctgatgccaccaatggcctgctggtggccctgctgggtgggggcctgcctgctggcttcgtgggccccctttctcatatggcttaccaggcttccaacctgccctcgctggagctgctcatctgtcgatgcctcttccacctccctattgccctgctacttaaactgcgtggcgacccccttctgggacctcctgacatccgaggccgggcctacttctatgccctgctcaacgtcctcagcattggatgtgcctacagtgcggttcaggtggtgcccgctggcaacgctgccactgttcgcaaaggttcttccaccgtctgctccgccgtcctcaccctctgccttgagagccagggtctcagtggctacgactggtgtggactgttgggcagcatcctaggactaatcatcattgtgggacctggactctggacactacaggaggggatcacgggtgtctacaccgccctgggctatgggcaggctttcgtgggaggactggcgctgtccctggggcttctggtctatcgttctctgcactttccctcctgcctcccaacagtggccttcctatctggcttggtggggctgctgggctctgtgccaggcctctttgtgctgcagccccccgtgttgcccagtgatctcccgagttggagttgtgtgggggcagtggggatcctcgccttggtctccttcacatgtgtgagctatgcggtcaccaaggcccaccctgccctggtgtgcgctgtcctgcattccgaggtggtggtggcccttatactgcagtattatatgctccatgagactgtggcaccttctgacatcgtgggggcaggggttgtgctgggcagcattgccatcatcacagcctggaacctcagctgtgagagggaagggaaggtggaggagtgagatagaacttgggagcccgggggttgggagggacagggataaatagaggcaaagactgaagacaaacatgggaggagaagtgactggaaaagaactggtgtgggagagggatacctctcagagtcaagggtgacttggggacttggtggagagggactacctggaagacctggggccagcctgggaccaagggatgtggagaccaggctgggtcctggaatcagggcataactaaggggtaaagtctgaggagcagatccaaacggctgaggcagggaggccgtgggccacggggaggacttcactcagcagcaaagagaagagcattggggctggagtgttccggcaaagacagagccagcagctgcggtgggggaggggagcgtgcctccccacccctcccctcacggcaaaggtttcctttcctcgtgcttgtgccccccccttggggtggtgacgtgacattgacatcaaacaaggattactctgaatgtggcttgcagtggtgtcgtctctgctttggagggagagtggaaagtcctacgaccgttctcattggagaaccccttgggatccccgccccccattttattcctgaaatattctacaaagtggaggatttcctaatgttcagatgccttgaccccaaatcccccaggactttcgtggcccgccccatggctaatctgcttttctcggattgtcgcggtcccgtgatctctcccggacagtggccaccctccttccagagcaggcctcccagctgaagtctcttcgagaggctcaggccatggatctaggatcatggctcggtacagcgcggcattacaggccaggagatgcccacccgtctccgggggccgtttgacaaacatcggctacttccggacaagccactggtcctgccatcttggtttgttcatgcatattcagcaagagaactgcatattcatgagcaaccgcccttccccgggaggacccgccccgccccgccgccattaccgattcgcagagcagaccattttccagctggggggggctacgaatgagaggcttttgctgaagatgaaaccgttgtccaaactagaatgaaagcggcccaattttaccctcgagtcttcaaaccttaagcctcagtgcaaaagggagcagcgaggagaggcggtgggattaaagaaaaaaattcttctctccctgtcacttcaaaaggtcgcccaaccagcgagcggggggtttacccacgactctggctcgcaccccttgcgggcctgcgcaggcggccccgtagcgcaagggagggcgggaaaggaaggggcggggacgcgagggcgaatctataagaagcgtcgttcagcgagttcgctgctcagaagcgccgagagcgcggccgggacggttggagaagaaggcggctcccggaagggggagagacaaactgccgtaacctctgccgttcaggaacccggttacttatttattcgttaccctttttcttcttcctcccccaaaaaccttttccttttcccttctttttttttcctttttgggagctgaaaaatttccggtaagggaaagaagggctcctttcgctccttatttccccgcctccttccctcccccaccttcccctcctccggctttttcctcccaactcggggaggtccttcccggtggccgccctgacgaggtctgagcacctaggcggaggcggcgcaggctttttgtagtgaggtttgcgcctgcgcagcgcgcctgcctccgccatgcacgggggtggccccccctcgggggacagcgcatgcccgctgcgcaccatcaagagagtccagttcggagtcctgagtccggatgaactggtaagcggctctgtcctccccttcccccctcctcccctggcgggcggggccggacgggggctgcggaaacttggcgctttctcgctgcttatgggtgacgggccaggagcatggctcagcagcgccaaggccgtgtaggcgccagtctcgggcctcccagagttatattttgcaaagagttgagcaggcgtagcgctttgtccgagatggggggctggctggagggtgagaaggagggagagaaggatgactgatttcacactccagagttaccgacgttaaaggcgatccgacgaatcctagggagtctttacaagtttggttaagaagccaaacccgggtagcttcctcctcttctgtaatacaaatgttaactgagcacctgctctgttgaagacacaggagactcgggttacagaggtgaacacgacagaccaggaccctaccttcaagagcactgtctgtgggaaagggcaagcagtaaacatgaatacaatgaatgaatgagataattcagttaatggcatttgtctcgaatagagtgaaaaggggtaatcccatggagagtcactgagctggggctactttatttttttatttttattttattttattttttgagacggagtcttgctctgtcgcccaggctggagtgcaatggcacgatctcggctcactgcaatctccgcctcccgggttcaagcgattctcctgccttagcctcctgagtagctgggattacaggcatgcgccaccatgccccgctaatttttgtatttttagtagaggaggggttttgccatgttggccaggctggtctcgaacgcctgccctgaggtgattctcccccgtctttttttttttttttttttttttgagacggagtttcgctcttattccccaggccagagtgcaatggctgaactcctgacttcaggtgatccacccgcctcggcctctcaaagtgctgggattacaggcgtgagctaccgcgcccgtcgaggtggggctactttagatgggatggcgtcagggtctgggaaggcctatcttagaagacattacccaaatgatgagaggcagccagtcgtcgaagccatagtttggatggcgagagcttttccggcagaggaaatagcaagtgcaaagggcctgagggagaaatgaacttgggcttgtcctacagggtgaaaggcggccggtgtggctgaggtttagtggatgagagaagagtgttacagaaataggctggagaagcatgggatattgtatattatggtaaggagtcaggacttaattccattttcagtaggtagtcgttgacaattataaacagagtgacagcacatttgaaaaaactactgctgtagttgctctatgaagaactgatgcgagaggaggagagaccagagagaggagggcagccctaggggagagctattggtgacttggactttttcccttgtggcgctaagtagaggagcccactggctggaaagaatggagttaagtggctgtttgtggatagagaccatttttgctgggagaaagttcagctatgtcaggagtcagaacgtcctgacctcacaccataccacagaatcagttccagatgaagttaagacttaaacctaaaaaaacccataaagcactagaaaaaaaatagaaggcttttgcagggctgataccagagacagaagtccttaatagtagtgaattaattataggcaaattttatggagtgcctaaaatgagctaaacgttatatataaggaagaccaaggcagatttcactacataaaaataagagccacttctgtttatagaggcactgtggcaaagctgaaaaacagatcaggaaacagtatttgcaattacgcagacaaggttaaatttattgatgtacaaggaacacaaatcagtaaggaaagtacctatctactagaaaaatgggtaaaggagatgaataggcagttcacagaaatagtgcaaatggccaacaaagagtagactttctaataaaaaaaatccagattaaaataaaattttttctcatctgattttttttccctgctggcaaaaatactgggaaatagacgtgcttatacattgttggtagaaagatagattggtataacctttttggaggatggtctgacaattttttttttttcgagatggaatctcactcttgttgcccagactggagtgcagtggcacgatcttggcacactgcaacctccacctctcgggttcaagcgattctcctgccttagcctcccaagtagctgggattacaggcgtgtgccacgatgcctggctatttttgtattttagtagagatggggttttgccgtgttgcccaggctggtcttgaactcctgacctcagaggacccgcccgccttggcctcccaaagtgctgggattacaggcatgagccaccatgcccggcctctggtctaacaattttatcaaccttttaatatgtaaatcatttgatcaagcattaccacttataaaaattcatccttaggttaaaaaagcttaattatcccctcaatgatgcccctttcccagtcttgcatggttcattaaatagtttctccattcatccatttgctcaggccaaaaatctaaaagccatctttgattctctttctcacaatctccacttagtccatctgccagagtgtcagtcctacctttcaaaatatgcctggaatccagccatttatgaccatctccaccaccatgtcccaccatatcccaccctactgtcatctttcctgtggggtgctatagagccctaattggtcttcctacagtttgtaagaacagctagaacaggctagagagatctcttcatcccttcccttcatagaatcctttccagaggtttcaggactccttactctgacctataaagtgctgttttatctggctcctgcttgcttctccatctcattactagtctcctctttgcttttcttgaaccacgctgactgcttgctcctctaacactgcaagcttattcccacctcaaggactttattattcactattcctcctgcttggaacaacgttgctcagacctctgctctgcatgcctgttcctttatgtctgtatgttctgtgttgaaatggcatatctttttttttttttggacacggggtatccctctgtcccccaggctggagtgcagtggctcgatcccagctcactgcagcctcttgggctcaaaagatgctccctggccaggctcaatcacgtctgtaatcccagcactttgggaggccaaggtgggcagataacgaggtcaggagtttgagaccagcctggccaaaatagtgaaactctgtctttactaaaaatacaaaaattagctaggtgtggtggcacgcctctgtagtcccagctactagggaagctgaggtaggagaatcagtttaacctgggaggtcgaggttgcattgagctgatactgtgccattgcactccagcctgcgtgacggagtgagactgtctcaaaaaaaaaaaaaaaaaggccaggcgcggtggctcacacctgtagtcccagcactttgggaggctgaggcgggcggatcacgaggtcaggagatcgagaccgtcctggctaacacggtgaaaccccgtctcccctaaaaatacaaaaaattagcagggcgtggtggcaggtgcctgtagtcccagctacctgggaggctgaggccggagaatggcgtgaacccgggaggtggagcttgcagtgagccgagattgcgctcctgcattccagcctgggcaacagagcgagactccgtctcaaaaaaaaaaaaaaaatgctcccacctcagacagacccccaacccccacctcagtagctgggacaacaggctcataccaccatgcctaatttttaaatttgttgtagagatgggttctcactatgttacctaggctggtgaactgggctcaagcgatccccctcctctgcctcccaaagtgctgggattccaggcatgagccactgcgcctggccgatgtcatatctttaggagcgcttccctgaccactctgtttaaatagcatcccccgcccttcccttgttttctctgatcattctctgctatattttccttcacagcctgtcactccagaaaggattagtttttctgtttcttgcttccttgctagagaatgaatttcatgagggactttgtctgtgttattcatgttcccttagtatctcaggtagtgcctggcacatgatagacatgtaataaaaattagttgaataaacaagtgaatgaaataattgggcaaatatgcatagataatgtagaaggacttttattgcaacattgtttgaaagtgacaattataaattactcggtatttactaataggaatcctgttgaataacttagggtgtattcttacaatgtaatagaggaacttcccaataaggtcccacactgtgctgatgccctgagacactgtggcacacggtgggcacagtgaggtattttaaatttccaagagaaacacaggtacatttgtcagataccctggaactcctagttcctggtagttctgtttcaacattagatggtgccaaatccctttctataatgtcatatttttgtgaaactgggtttttagcagttgctaagtacaggcaaaaatcagtttgtagaagaaataaaggtggtgctgtttagtctgattccaaggtttgagaggtgcagtgcctaacaggcgccataagtgagtgagatggttatttggtaaagaaataaaaatgttattttgttttaatatattaatagtattttcaacttgtgtgtattttctcaaatggctagtaagttcctaggacataaatgcttaagttgtttgggtctaggtgcttaataaattgctgtcttttcttggaaagatggagtcttgctctgttgcctaggctggaatgcagaggtgagatctcagctcactgtaacctctgcctcctgggttcaagctactctcctccctcagcctctcaagcagctgggatcacaggcatccgccaccatgcccggcaatttttgtatttttggtagagacagggtttcaccacattggccagaccggtctcaaacttctgacctcaagtgatctgcccaccttggcctccccaagtgctgggattgcaggtgtgagccaccgcgctcggctgtggctctcttttgacctagtaagtgctgtgagagttactgaaatggtaagggcactgtgggctgttgataatgttagggaatctatggataaatgaaaaagttactcagaagtatgcagagtgaaggccttatgttaaagtgggaacgtatttacggtttttttaaagcatgaaaaaaaatgcatgccgtggctcatgcctgtaatcccagcactttcggagcctgaggcaggaggatcatttgaggccaggagttcaggaccagcctgggcaacacagcaagaccctatctcaatttaaaaataataataacaaatgggctgagcacggtggctcactcctgtaatcccagcacttcgggaggccaaggtgggcaaatccccgagggtcaagagttcaagaccatcctgtccagcctagtgaaaccccgtctgtactaaaaatataaaaagcagctgggtgtagtcgtgggtgcctgtaatcccagctacttgggaggctgaggcatatgaaccacttgaacctggtaggcggaggttgtactgacccaagatggaataataacaaataaaagtatgggacactgttgacaaagctctaccagagtcatctctggggtgtaggattgttgggcttcgatagtgctctgcatgtcttgcagtttatacgatgtctgtattttgagggaccaacagacggttcaattttgggtagaaggatgggtgagggtgagtaaggtgcctcttgttgtgaaacaggtggtattttaggctaaaatgttttacagaagtcttaggggtcagagtgtatggaggtacggaggggtctttgaattggctttgagatagagctgttgtccttgctgttagaagatggatttagatgttgctaggtgaggggaaggttacaaggcgggttggtactagagctttgtaccagcgtgtgcacaaaattttggggaaagagggtgctggatttccttcgcagtagttgacccctattcattaaaaacaactgtctatcatggaatgcataacttatttataccctgacttatttaaataaggatttaaagcagtaatctgttctttttttttttgatacggactccagctctgttgcccaggctggagtatagtggcacagtctgtgctcactgcaacctctgcctcctggattcaagcgattcttctgcctcagcctcccgagtagcaggaactacaggagcacgccaccacacccagctaatttcttttttgtatttttagtagagacgggattttactgtgttgtccagactggtctcgaactcctgaccttgtgatccacccaccttggcctcgcaaagtgctgggattacaggcatgagccaccgcacctggcctagtttttgtatttttattagagacagggttttaccatgttggccaggctggtctcgaactcctgacctcaggtgatctgcctgcattggcgtcccaaagtgctgggattacaggcttgagccactgcgcctggtcaataatgtattcttttaggtagagtgtgggctacattgatgagtgagaagatgatccttgttttcaagttacctataatcttgtgagggatttcctatgtatgcagcaaatagttactgagcctcaaccatatgttggttactgtgctaggtgctgaggatatgaagagaaaacatgacccttgccctcaaggattacagtccaatgagagagacagatgtgtcaccaagtaattaaaattgggctgagaaccttgctggggtgtgcataagactaggaagagttagagaagacttcataaggaggtgacctctgaactgggtcttaaagaataaatagaagtttactcccaagggggtgtgtgaagcaaaaggagatttgagaaatctattgtatttagaacataaatgtgggaggcgggtaggagaatgtggtaccaaataaagctgtaaaagcaacttgaagccaaattgtaataaggaccttgttagctttgctaaagcagaggaaagaggacgagtatttactgagattcaatgacagcccttttgttattgtggcctcaggggcagaacccaaagagaacccagcctgactggccaccccctcaagtgtttaacctttatcctgtaggcagtgagaaccattgttggccgaagggttgggggctaatttaaaatgacagtttgaggcctggtgcggtggctcacgactgtaatcccaacactttgggaggctaaggtgagtggatcacttgaggccaggagtttgagaccatcctggccaacatggtgaaaccctgtctctactaaaaatacaaaaattagccaagtgtggtgagcacctgtaattccagctacttgggaggctgaggcacaagaatcacttgaacctgagaggcagaggtggcagtgagccgagattgtaccactgcactccagccggggtgacagcaagaccctgtctcaaaaaaaaaaagtaaaataaaataaaaaatgagagttcgtgaacttggtgatggagggatagctcttctcattaacaaggatatgcgtgtctgctgtctaggacaccccctgacccggtctcagaaagcctgaaagcagaattagtcattagaagggtggttggcttggtcggcatagactttgagcagaaagaggttgaaaatgttgagcctgatttctcttaggcccctctgcagtgtctgttgtggaggccagatacgtaactgcttccgctttttttggtctcattcaaggtgagcaaatccccttcatgtttctcaccagacaatgcagctgatgaggttccagctttgcaaatgtagtcatccatgaggactgtcttcctgagatttcatcaggtcatgttgatgagagttttgaacctgtctgaggctgagaggtgtgcagaacttcttcagctttgcatctgtagaccattttggtttctacccagcagtggccaatcagacctattatgaggggattactggtttgactgtcagagggtaacctctctttttccaagttttttgagggtacctccctccagtggagagtcctaagcagtaggtcaatttaacagacatttgttaggagcccaccatgtttcaggcaggcacatgggattcaggatggttgaggcattctgcctgcctgagaggtgcttatagttatagggaagacagacccccataggtcattttattgcattgttgtatgtgcagtgatagagggctgtggaagcacagaggaggggtgcctgtctactttgggcaggctgtggaaaggcttcctggaggaagcagtgcctgagccgagtcttgaaataggagttttgcagtgggaagagcattccaagcagagaggcactagcatatagaaaaccccggaggaacgcagcacgtgttgcgctggatgtgataggcgactccagggaattgttactgaggagtgaacaggaaggtgtggagcatcagggaaatgaaggttgagaacatcataaaatccttttgggaagctgtcctgctgagtttggatgtcagtctgaggacaagagggtatgaatgattacatttttagtttattattaatttttattttatttatttttagcacacatttttattttagaatgagcaccccagttgtaatgtagaaggattggagagagacaggctggtgacccataggaacgctctgttgtagactacaaaggaagggcctgaactagggcaatggtggtggggatggagaagagaggcaagattcaagaaacacttaggaggccaggcgtggtggcttatgtgtgtaaacccagctgagattcccgccactgcactccagcctgggtgacagagcaagacttcttaaaaaaaaaagggaggtaaaagtgaccagtacctggtgaatgactgaataataataatgtccattcataaagcgccaattacatcctggacttaagcaagctaattaagtccttaatggttacatagttcataagtaatataggcagaattccaaagcaagggtgcccgacagctaagtccatgttctttggactgttttgtgcttgaaggtaaggaaaggtaagcataggtttctgaatctgggatagagactaaaggaaaaagagaagcttttgtggaaaagagagtttgcttttaaacatgtttaatttgattttttggtgtgatgtttgcagggggttcagtaggtagtcacatacgtgaacccaaagtccagaagaaaagtaaggcctggaattagagagttgagaatgagtatccaagcataccttggagatactgtgagtttggttccagcccaccgcaataaagcaagtcacatggagttttttggttgccattgtgcatgttacattagtactatgctgtagtctactaagtctaagtgtacaatagcattacaatttttttttttttttgagacggagtcttgctctgtcattcaggctgaagtgcagtggtgcgatctcagctcactgcaacctccgcctcctgggttcaagtgattctcctgcctcagcctcccgagtagctgggattacaggtacccatcaccacacccagctaatttttttgtatttttagtagagatggggtttcactatgttggccaggctggtctcaaactcctgacctcaggtgatccacccgtctcagcctcccaaagtgcagggattacgggtgtgagccaccgcacccggcccatctacttctgagttcttctgtttcctcctttccttcattgaaatgtccccatcaagtcctggctcttcctttcttgggattccagctattcacttttgcttcaaatcatttccaccaacctgtttttctagcacctgtttctccagtcttttaataaaatctctggcctggcgcggtggctcacgcctgtaatcccagtactttgggaggccgaggcgggtggaccatgaggtcaagagaccatcctggccaacctggtgaaaccctgtctctactaaaaatacaaaaattagctcgatgtggtggcgctcacctgtagtcccagctacttgggaggctgaggcaggagaatcacttgaacccgggaggcagaggttgcagtgagctgcgattgcgccactgcactccagcctggcgacagagcgagactccatctcaaaacaaaacaaaaccaataataaaatctccatctggacacgaaagggttcaagcagttcaggccttgagaaggagggcatgacaaagatgagggaaaagaaacagggctgcatctctgagtgcctcgtttcttatcaggggcttgagttggcggggcatgtcttggtgcagaacacctgggctgtcatggcgagggtacaggtacagagaggcttctgccaggatctcagattcatgagcttgatttctgcttgggaggaacaaataaagcattgttttgtttttttgtttttcctgaagcaactttgatttctttttgtggctaaatcctatggatgtcagagacctagaattcaacccagatggaagtctggggttcatgtcccagtagcaggtgatttgtatggaacccaggatcgaccattatctagtgtgagtgcttttcctgcctcagtgactggaataagcctctgacttgggatattcaactttggccttttcagaagtgtacacacaccaatcccccattcccctcactccaggctaaacttagttcttctgtaagtagttcagggttttcccagaccttagtccagagctccccagccacaaaggctagaaactaggaacgctgttcagttgttggcctttctttctttgcagaagcgaatgtctgtgacggagggtggcatcaaatacccagagacgactgagggaggccgccccaagcttggggggctgatggacccgaggcagggggtgattgagcggactggccgctgccaaacatgtgcaggtaagtgctggggggccaggtgggatcccaaaggggaggtgggttgggtcctcaaaactagggctgacggttgacacctggaggcctctgagatgagtgggagctgggaggaaagcactgggtgtgtgtcccacaggaaacatgacagagtgtcctggccactttggccacattgaactggccaagcctgtgtttcacgtgggcttcctggtgaagacaatgaaagttttgcgctgtgtctgcttcttctgctccaaactgcttgtggactctgtgagtggggaacaggctctggtctgggagcgggggtgcttggtagggggcagggggacagcttcaactgaccctgctctgccctgtccccagaacaacccaaagatcaaggatatcctggctaagtccaagggacagcccaagaagcggctcacacatgtctacgacctttgcaagggcaaaaacatatgcgagggtggggaggagatggacaacaagttcggtgtggaacaacctgagggtgacgaggatctgaccaaagaaaaggtggctggggctggcggagacttttgggaaggaggggtcagaggcctggagggaggaaactggaagggaaggaaacaggaggggctggcctggtgtggagggaaatggcccaccctctgggctctgatggcccctgtctctccttggaagggccatggtggctgtgggcggtaccagcccaggatccggcgttctggcctagagctgtatgcggaatggaagcacgttaatgaggactctcaggagaagaagatcctgctgagtccagagcgagtgcatgagatcttcaaacgcatctcagatgaggagtgttttgtgctgggcatggagccccgctatgcacggccagagtggatgattgtcacagtgctgcctgtgcccccgctctccgtgcggcctgctgttgtgatgcagggctctgcccgtaaccaggtcagtggctccagggctctgcctcttagctggagggcgaggtgtctaaagggaggaagacctgtaggtggggatgggtggatggacctgggtttgaaaattcccctgctacttactagctgtatgatctttaatgagtcctttcacatggttaaaggccacaaacgtgtttctgaatctataaatgatagtgggcagtcctgcctcctggggtggtgtgaggatgagagctgtgctgtgtgcctggtacgttcctgccgagcgctggcagtggtggctggaccatgatgattctgacttcctgcctcaggatgacctgactcacaaactggctgacatcgtgaagatcaacaatcagctgcggcgcaatgagcagaacggcgcagcggcccatgtcattgcagaggatgtgaagctcctccagttccatgtggccaccatggtggacaatgagctgcctggcttgccccgtgtgagtcagcatgctccccacccctctgtgtattggagccagggtgggggctagcatgaggcttcagagctctggaagagggcccagtgctgactttctggattgcccccaccctgtgttttttcctcacaggccatgcagaagtctgggcgtcccctcaagtccctgaagcagcggttgaagggcaaggaaggccgggtgcgagggaacctgatgggcaaaagagtggacttctcggcccgtactgtcatcacccccgaccccaacctctccattgaccaggttggcgtgccccgctccattgctgccaacatgacctttgcggagattgtcacccccttcaacattgacaggtgtgcctccgttggaaagcccttcctggaatggctagggaagacatggcctcagtggcaaggcttcgagagtctgctcctcctacctcgggcgtgggcttggagcaaggaggaattgaagttctgaagtttaacttccactcagggagggtggctgcaggggtattttaggaagcattgagttcattgcacctctttccttcctagacttcaagaactagtgcgcagggggaacagccagtacccaggcgccaagtacatcatccgagacaatggtgatcgcattgacttgcgtttccaccccaagcccagtgaccttcacctgcagaccggctataaggcacgtagcaggccagggcctctctcagccacctgagcagaaagctttccaagatagggcaggctgggttaggccatctgagtctgtctcgttcattgggatccagacttgactgtcttgttaaaggctgttgctgcccaggtgtgcagggagctgttggtctctggcattcagggtgggggtggtataaacccggggcagcttgcatatggcagggaagagggatccgtggaggaacagtgcagaaggctttatgttcagaatctctcttgcttttcttctagactgagttccttgagattggtgaatgctgtgtattattcatccctgataacctggtgtttggcccagggccttgtccagaggagtgtttaataagtgtttcaagtgaattagcaccacgatgtcatctcttttcagtttacaaaggacttttttttttttttttttttttttaaagaagacagtctcgctctatcgcccaggctggagtgtagaatgcagtgctgtgatcttggctcactgcaacctctacctcccaggctcaagcgattcttctgcctcagcctcccgagtagctaggattacaggcgcgcgccaccacacctagcttatttttgtattttcagtagagatggggtttcaccatgttgaccaggctggtctcaaactcctgagcttaagtgacgtgcccgcctcagcctcccaaagtgcttggattataggtgtgagccactgcactggacttgcaaaggactttaggtccattgtccttttattcttagatacctccttcactgagaccttttccttacctcacctctctaggtggaacggcacatgtgtgatggggacattgttatcttcaaccggcagccaactctgcacaaaatgtccatgatggggcatcgggtccgcattctcccatggtctacctttcgcttgaatcttaggtcagtccctggctgagggaagcaggctggaattggtgggaggcgggcaggctgggtggctcctcaaggtttcgctgcagacatcttcccaaccctgacttttctctttaactgtagtgtgacaactccgtacaatgcagactttgacggggatgagatgaacttgcacctgccacagtctctggagacgcgagcagagatccaggagctggccatggttcctcgcatgattgtcaccccccagagcaatcggcctgtcatgggtattgtgcaggacacactcacagcagtgcgcaaattcaccaagagagacgtcttcctggagcgggtgtgtggtccaaatggaaacctggcttaagtgggcagtggggctctggggtgcaaggtggaggctagagaggaagagctgtgttttttttcctgacttacccagcagtggtctgtgagattgtcttttctggtgggcgaacaaaaagggggttaggaaaactcaggccaaaaaggtgtaaggcgttaattccccatttaattccttaaaatttcatgtaataccaggtattgcctgtaaaggaaagataaagggaaaaataagtaagaccttgttcaaattttatttttctattttaaccttcacttatttcctaattattaaaagaaatttatgcttattgttaagaacaaaaacaaaaatttcagtattacaatgaatttttaattaaaagtttttggggccgggcgcagtggctcacgcctgtaatcccagcactttgggaggccgaggcgggtggatcacgaggtcaggagatcaagaccatcttggctaacacggtgaaaccccatctctactgaaaaatacaaaaaattagccgggcgtagtggcatgagcctgtagtcccagctacttgggaggctgaggcaggagaatggcgtgaactcgggaggcagagcttgcagtgagccgagatcacaccactgcactccagcctgggcgacagagcgagactccgtctcaaaaaaaaaaaaaaaaaagtttttgggactgggcatggtgactcacacctgtaattctagcactttgggaggccgaggcaggcacatcatttgaggccaggagttggagacaactctggccaacatagagaaaccccgtctctaccaaaaatacaaaaattagccggacatggtggcaggtgcctgtaatcccagctacttgagaggctgtggcaggagaattgcttgaccccaggaggcggaggttgcagtgagccctgattgcaccattgcactccagcctgggtaaacagcaagaccctgtctcaaaaaattaaaggttggaaaaaacttttcctgtcatctttgcctccaaaatctggctttctcccttgggcagggaaacctccccaacatttctctatcatccctgagatgtggggcctgcactctgacttctgtctgccttactctttgtcttacagggtgaagtgatgaacctcctgatgttcctgtcgacgtgggatgggaaggtcccacagccggccatcctaaagccccggcccctgtggacaggcaagcaaatcttctccctcatcatacctggtcacatcaattgtatccgtacccacagcacccatcccgatgatgaagacagtggcccttacaagcacatctctcctggggacaccaaggtagggcttggcttctggatatgtgaggacagaatttggacgtgggagccaggaccagagcaggggccttgagtgggtgctttgtccttaggtggtggtggagaatggggagctgatcatgggcatcctgtgtaagaagtctctgggcacgtcagctggctccctggtccacatctcctacctagagatgggtcatgacatcactcgcctcttctactccaacattcagactgtcattaacaactggctcctcatcgagggtgagcatggaggcgtggtaccaagacgtctctgtgaattctctaacttcttactgtccttccatccctttctttcctccttggatttggtgccccctgcttctactctcttggctataattccattccatgtttcttagaggtccaaaggggtttgctgatgtttttccctgtctctaggtcatactattggcattggggactccattgctgattctaagacttaccaggacattcagaacactattaagaaggccaagcaggacgtaatagaggtaagaggggaggccaccagagacggaataaggggtttccagggacttcgaagttagcatcatcaagagcaaagggagtgtaaggttagagggaaggggcagagagtagggattgatgtctcaccgagaactctgcctccaggtcatcgagaaggcacacaacaatgagctggagcccaccccagggaacactctgcggcagacgtttgagaatcaggtgaaccgcattcttaacgatgcccgagacaagactggctcctctgctcagaaatccctgtctgaatacaataacttcaagtctatggtcgtgtccggagctaaaggttccaagattaacatctcccaggtgagaagccttgtttttccatatacggggccgctgtgaagtttgggaggaggaaggaaggtgtttgtatgtattagggtcaggagaatcacgggagttgggggaaattttgggaactgttattcttaaggcagagggaattcagtatacaccacctttctgtttcccaggtcattgctgtcgttggacagcagaacgtcgagggcaagcggattccatttggcttcaagcaccggactctgcctcacttcatcaaggatgactacgggcctgagagccgtggctttgtggagaactcctacctagccggcctcacacccactgagttctttttccacgccatggggggtcgtgaggggctcattgacacggctgtcaagactgctgagactggtgaggctttcctcaggggtcttccttgggctgttagcagggactgctgcaggctgagaaacccctaacaggtggggagcggaaatgctcaggctcctattcccagggtataattctggcccttgtggaaagaatagagtctcaagagtaggcaaacacccttgtttggattgctgtgcagcattgcacagtgcagggacagagcttccggggctctgccggcctgtcccatgggagtggttcctgctgggctttttgtccgtctagtggtagacactgagtttgcattcaaaggcctcagacacagagagtactagctgactcttctgacagtcaggtaggttaaggccccagcctgggtctttgggctttatcatccccttacttccctccaggatacatccagcggcggctgatcaagtccatggagtcagtgatggtgaagtacgacgcgactgtgcggaactccatcaaccaggtggtgcagctgcgctacggcgaagacggcctggcaggcgagagcgttgagttccagaacctggctacgcttaagccttccaacaaggcttttgagaagaagtgaggaggcgggcaggcgggtggttctcgcccctggggctcagggcctgagtagtaggattcccatacctattccagagagatagcctggtatgtgtcttgcactagagcttacctttcagcatccttccccacctatctgaaacagctgtgtgacatgggggaggtggtggatggaggtggatttaagattggtccccacatcgtccctgctgatattataaagcagatgcagaggggtgggcctgtactcaggtcccagtggcagtccttgggcctgaatttttctctgtccaggattcttgcctccaaaccactgtacttggtcggctgtgcacctttgggaaccttacagtgcgttttgtggggaccaaggtcccagagcccacctgtccactagctaccccttgcacttccaggttccgctttgattataccaatgagagggccctgcggcgcactctgcaggaggacctggtgaaggacgtgctgagcaacgcacacatccagaacgagttggagcgggaatttgagcggatgcgggaggatcgggaggtgctcagggtcatcttcccaactggagacagcaaggtgcgtgtgggtcgaagtgctgatgctagagatgtgcctccctggatggctgtccccagacacagccctccctccatttccccctctctcaggtcgtcctcccctgtaacctgctgcggatgatctggaatgctcagaaaatcttccacatcaacccacgccttccctccgacctgcaccccatcaaagtggtggagggtaagtacctgcttaggggtctccaagccaggctaggggataggagactgctgggccctggtctaatgatctcctcacctttaattggtccccaggagtcaaggaattgagcaagaagctggtgattgtgaatggggatgacccactaagtcgacaggcccaggaaaatgccacgctgctcttcaacatccacctgcggtccacgttgtgttcccgccgcatggcagaggagtttcggctcagtggggaggccttcgactggctgcttggggagattgagtccaagttcaaccaagccattgtgagtgttgtgctcttcacagcagtcttcttttcctccttttacctgttgacttctgtggtttccaagagcagcccacttctgtccacaacctacagaataggttctgtaggttctgtcccacctaataatagctctcattcatggagagactgcttgtaccttaccaagtcctgtgtttggcccattatcgctttataccatcatggctttaatacactcctagtaggggagggtttgttagtcccatgttgcagagacaaaaactgaggcttggagagagtgactggattgtgtgatggtcatataggaagtaagtggcatgactgggatatgacataggagaattgttctttttttttttctctacactctctgctgtgtgcagggtctaatttagataaagatagggaattggggctaggtggggtggctcacacctataatcccagcactttgggaggccgaggcaggcagatcacaaggtcaggagttcgagaccagcctgaccaacatggtgaaacaagggtgaaatacaaaaattagccgggcgtggtggcgtgtgcctataatcccagctactcaggacgctgaggcaggagaatcgcttgaacacaggaggcagaggttgcagtgagccaagagtgcgcctttgcactccagcctgggcaacagagcaagactccgtctcaaaaagggagttggagagagtaaatagaaaaaaagatttatggctattggaatgtgctttcactggctttaaggattttataggatagtaagagggtaaagcactgttacaggcgtacctctgaacctgtttactgtaagtcagtttttataaattaaataattaaaaatgtattagggaacaccatagaacatggctgaaagaaattgtaaaagacctaaatgaggccgggtgcagtggcttatgcctgtaatcccagcactttgggaggccgaggtgggcagatcacctgaggtcaggagttcaagaccagccttaccaacaggaagaaaccccacctttactaaaaatacaaaattagcagggtatagtggcacatgcctgtaatcccagctactctggaggctgagacaggagaatcacctgaacccggggatggaggttgcggtgacccgagattgcaccattgcactccagcctgggcaacaagagtgagactgtatcaaaaaaaaaaaaaaaaaaccctaaatgaaagacctctcatattcatggattggaagacttaatattgttgaatattaatattgttaatatacttcccaaaataagctatagatccaatataatccctatcaaaattccaactggctttttctcagaaatttattaagctgatgttaaaattcatatggaaatgcaagggatatagaatagccaaaacaatatttaaaagtagcaaaagtttggagaactcacattcctgatttcacaacttactacagagctacagtaaacaagactgtgcttctgtcatgaggatacgtataaagactgatagagtagaattgagagtccagaaataaaccctcacatttatggtcacttgattttttgcaagagtcccaatttaattaaatggggtgagaatactctttttagcaaatggtgctagggcaactagatatccacatgcaagagaatgaagttggattcctacctcataccatgtacaaaaactctcaaaatgcctaaattgaagagctaacactataaaactcttataaggaaacttgaataaatcttcatgactgtggcttagcagtgaattcttaggtatgacaccaaaagcataagcatccaaaggaaaaaatagatgaattggacttcatcaaaatttaaaacttaatgcttcgtaggacactatcaagaaagtaaaaagataacacagagaatgggagaaaatatttggaaatcatctgataagggccatacataaagaatatataaaggactataacaataaaaagtcaacaataaaaagtctcaaaggatttcaacaaatgtttcctggctgggcgtggtggctcacgcctgtaatcctaacactttgggaggctgaggcgggtggatcacctgaggttgggagtttgagaccagcctgatcaacatggagaaaccccgtctgtactaaaaatacaaaattagccgggcatgtcggcacatgcctgtaatcccagttactcgggaggctgaggcaggagaatcgcttgaacctgggaggtggaggttgcgatcagccgagatagtgccattgcactccagcgtgggcaacaagagtgagactctgtctcaaaaatagtaataaaataaaaaaacaggctgggcgcagtggctcacgcctgtaatcccagcactttgggaggccgaggcgggcagatcacgaggtcaggagattgagaccatcctggctaagacggtgaaaccccgtctctactaaaaaatacataaataaataaataaataataaaaaaaacatgtttccccaaagaagagtactattcatgtaaatgatcagtaagtgcatgaaaagatactcaacatcattagccatcagggaaatgcaaatgaaaccagagtgatgtgccacttcacatgcactaggatgactgtaatccaaaacacagataataacaagtgttgacaaggatgtggaaaaattagaaccctcatacattgctagtagaaaaggtacaactgctttaggaagttaaagcagttaccatatggcccagcagtttcgttcctagagagattatacacacacacacgagagaacagaaaacatatggccacacaaacatttatacacaaatgttcgtatcagtgttacagtagctaagcagtgaaaacaagtgtccatccactgatgaatggataggcaaaatgtgatatgtccatatgagggaacatcattcagcaataaaaagtaatgaacaggctgggcctacgtggtggctcacgcctgtaatcccagcactttgggaggccaaggcaggtagatgacttgagttccagaccagcagcctgcccaacatggtgaaacccccaactctaccaaaaatagaaaaattaagtgtggtgctacatgcttgctatcccagctacttcggagggtaaggcaggaggatcacttgaacccaggcagcagaggttgcagtgagctgagactgcaccaccgcactccagcctgggcgacagagggagaccatctcaaaaaaaaaaaagtaacggacagccaagcacagtggctgatgtctgtaatcctagcactttgggaggctgaggtgggaagattgcttgagcccagaagttcaagaccacccttgggcaacatgacaaaaccccatctctacaaaaaatttagccaggtgtggtggagtgcacctgtaatcccagctacttgggaggctgaggtgggaggatacctgaggccaggaggttgaagctgcaatagtgagctgagatcatgctactgtacttcagcctgggcaacagagtgagactctatctcaaaaaaaaaaaatctgtcaagccacaaaaagacagtgataagccagatgcactggctcataactctaatctcaacactttgggaggccgaggcaggaggctcacgagagcccaggagtttgagaccagcctgggcagcataacgaaattctgtctttgccagtgatgaaccttaaatgtatacttgcttaatggaagaaattagtctgaaaaagttagatactgtgattccagttaagtttaatttcgtatgtgactatctcataacacatacggggagcttcctatttagctaactgttataaaatgaatatttacggagtaattttaacataggtttagaaatttggatcttggccgggcgaagaggcccacacctgtaatcccagcactttgggaggccaaggcgggtggatcacctgaggtcgggagtttgagaccagcctaaccaacatggtgaaaccccgtctctactaaagatacaaaaaaatattagctgggtgtggtggcacgcgtctgtaattccagctacttgggaggctgaggcaggagaatcgcttgaacctgggaggcagaagttgcagtgagccgagatcgtgccattgcactccagcctaggcgacggtgagactccgtctcgaaaaaatttggatctcagatggtatagtagctttctttggatgtgctgcataccaggtgccaaatggcgtcctataaatggaagctcttgtgtgaggaaggggatgatcaaataagagttttgtttttgttaagagtctgtctgccttttccgaactcatctacccatgtcctttaagattacagtcctggccctgtgataagccagatgcagatccacatcgtactcattcactgaaagagaggcgttggctttgtctgatgctagctttttcttaggcgcatcccggggaaatggtgggggctctggctgcgcagtcccttggagaacctgccacccagatgaccttgaataccttccactatgctggtgtgtctgccaagaatgtgacgctgggtgtgccccgacttaaggagctcatcaacatttccaagaagccaaagactccttcgcttactgtcttcctgttgggccagtccgctcgagatgctgagagagccaaggtagggatcaggactgctgggctttttggccggaagaaaagaaggagaactcaactgggtatggtggctcatgtctgtaatcccagcactttgggaggccaaggcaggtggatcacctgaggtcaggagttcaagactaacctggccaaggtggtgaaaccccatctctactaaaaatagaaaaattagccgggcatggtcgtgtgtgcctgtaatcccagctgctagttggggctgagacaggagaatcgcttgaacctggggggcagaggttgcagtgagccgagattgtgccactgcactccagcctgggcaacaagagcgagattccatctgaaagaaaaaaagaaaaaaaaggagaacttttccccttgaataaagggttttggattcccttgataaggagggttagaagagacgtttagagctactcagttccctgtgtcatggacttctgtctcttcccaggatattctgtgccgtctggagcatacaacgttgaggaaggtgactgccaacacagccatctactatgaccccaacccccagagcacggtggtggcagaggatcaggaatgggtgaatgtctactatgaaatgcctgactttgatgtggcccgaatctccccctggctgttgcgggtggagctggatcggaagcacatgactgaccggaagctcaccatggagcagattgctgaaaagatcaatgctggtaagcctaggagggctggcctggctcaggagccccgctctctgggctaccacctatcgtgttcaccgcacttgagcccccaaagagctacccaccctcacccccatgcatgtaccagttccgcccctccgaggcatcctccaactctccaggtcccctctgcactccctttctcttctgaatgttctcccttcccctttccagggggttctatgaaaagaaagtttctgtgaggagcggggagccaaaagagagccttgctcagagagagctgcgagtggacagtggctggggccagtccccttagctgcagcctttctcatggctcctcaccccaccaggttttggtgacgacttgaactgcatctttaatgatgacaatgcagagaagctggtgctccgtattcgcatcatgaacagcgatgagaacaagatgcaagaggtaatgggggtcctagaagtcagcgtgtcacatgtataaaacgcatgaatcacgttagagaccaaagaaaagaagatgcaatcaacattgaggggcggccaggcgcggtggctcacgcctgtaatcccagcactttgggaggctgaggcgggtggatcacctgagctcaggagttcgagaccagcctgaccaacatggagtaaccccgtctctactaaaaataaaaattagccgggcatggtggtatgtgcctgtaatcctagctacttgggaggctgaggcaacaagagtgaaactatctcaaaaaataaaaaaaacattgaggggccagtcatacccacctaatttagggatagggaatggtgattagcaacgattttcaaaatccacagcaccggccgagtagataaaacaggtggtgttgaaataggagataggagtgcctccctgtcacgctgtcacttggctctcctcccccaaggctcctgcagcttgctttgcttagggaatacaagccccacccctgaggcaggggccagacttgggggcaggttgggcagtaggcattgctatgtcctaggggaagtcgtgtgacagccataacaagacccatgaaaaggctggatcagtgacttcactcctgggcatggctcctgagatacttgtttggcacatgttggtacctggtgctttagtaataaaaactgaagaactcaggctgggcatggtggctcacacttgtaatcccagcactttgggaggccaaggcgggcagattacctgaggtcgggagttcgagaccagcctgaccgacatggagaaaccccgtctctactaaaaatacaaaatgagccgggcgtggtggcgcatgcctgtaatctcagttactcaggaggctgaggcaggagaaatgcttgaacatgggaggcagaggttgtggtgaggcaagatcacaccattgcactccagcctgggcaataagcgaaactccatctctaaaaaaacaaaaacaaaaaactgaagaactcactaactgctgaactgctgtcagagaacagttataaaagcattgataggtcttgatggaatacagtatatggccattagaagtgatcactgtcatgccagcagcagcctagatgaacacacagtgaagtgccagagcagggaatggtgtgtgctcgggtacagcagttgggaggatatgacatgtacgtggagcccgcctctcgctaggcgcaggactgcacaagagtggaagttgtgacggggtggtgggatttgggtgcctttccttaggcttcttttaatattgtaaaatcaggattaaaagtctcactggagaattgcaggaacatgggaggtagaggttgcagtgagctgagatcgtggcattgcactccagcccaggctgataacagcgagactccacctcaaaaaaaaaaaaaaaaaagtctcactggaactgtgaggggcagagcctggtgactgactcgtttggccctcaaagaggctgtagttggaggcgagagctggggaagagaccagaggatgccaagtgctgacctcactctcactgcaggaggaagaggtggtggacaagatggatgatgatgtcttcctgcgctgcatcgagtccaacatgctgacagatatgaccctgcagggcatcgagcagatcagcaaggtcagccatcccctctgccaccgccttcctcctcccactcccacactcccctccctgcctactctgagcacgctgtcttcccacaggtgtacatgcacttgccacagacagacaacaagaagaagatcatcatcacggaggatggggaattcaaggccctgcaggagtggatcctggagacggacggcgtgagcttgatgcgggtgctgagtgagaaggacgtggaccccgtacgcaccacgtccaatgacattgtggagatcttcacggtgagcccgtgtgtgctgcctagctgcctttcgtggatctctggctctcaggcccctcattctgtgctgtccactcaggactttttctgcctgattccatttctgagtgtgggatatcctggctcctgacaccctccctggatctgggtggcgacagaagcagggaagagagcagagttgctcagtcctggccctcccctccacttccctcccctgtgccaggtgctgggcattgaagccgtgcggaaggccctggagcgggagctgtaccacgtcatctcctttgatggctcctatgtcaattaccgacacttggctctcttgtgtgataccatgacctgtcgtggccacttgatggccatcacccgacacggagtcaaccgccaggacacaggaccactcatgaagtgttcctttgaggaaacggtaacagtggaatttctgaatagggcagaaggagggagtagtgtgagaagaagggcacacactttgggcagctgggctgtggtgatgggacagtcaggtgctgtgtgtggaggggtctcatggggccggtctgctctgttcaggtggacgtgcttatggaagcagccgcacacggtgagagtgaccccatgaagggggtctctgagaatatcatgctgggccagctggctccggccggcactggctgctttgacctcctgcttgatgcagagaagtgcaagtatggcatggagatccccaccaatatccccggcctgggggctgctggacgtgagtatgaggccccagctgcggtacctgcttgcgtcggcgaggcgggggggcaggccatgggtgcaagggtgtcaccagtccatgattgctgttcttgctcctcacgatttcctgtgttcctctttgcagccaccggcatgttctttggttcagcacccagtcccatgggtggaatctctcctgccatgacaccttggaaccagggtgcaacccctgcctatggcgcctggtcccccagtgttggtgagtaacctgatccaggaagagggccctccaggtggttcagaggtggataagctgggatcgtgaacggtagccattgttggaactctgaaggccgcagagggctagtgaaaggtggggcagggagaattgggggcctttggtctcccgctctggccttaacttgcttctctcactctatagggagtggaatgaccccaggggcagccggcttctctcccagtgctgcgtcagatgccagcggcttcagcccaggttactcccctgcctggtctcccacaccgggctccccggggtccccaggtccctcaagcccctacatcccttcaccaggtgagttgtcgccatctgtcaggccaggtttgtttcctccacagttctgggtgagtctgtccattgctcatctcctttgttggctgcttccccacaggtggtgccatgtctcccagctactcgccaacgtcacctgcctacgagccccgctctcctgggggctacacaccccagagtccctcttattcccccacttcaccctcctactcccctacctctccatcctattctccaaccagtcccaactatagtcccacatcacccagctattcgccaacgtcacccagctactcaccgacctctcccagctactcacccacctctcccagctactcgcccacctctcccagctactcgcccacctctcccagctactcacccacttcccctagctactcgcccacttcccctagctactcgccaacgtctcccagctactcgccgacatctcccagctactcgccaacttcacccagctattctcccacttctcccagctactcacctacctctccaagctattcacccacctcccccagctactcacccacttccccaagttactcacccaccagcccgaactattctccaaccagtcccaattacaccccaacatcacccagctacagcccgacatcacccagctattcacctactagtcccaactacacacctaccagccctaactacagcccaacctctccaagctactctccaacatcacccagctattccccgacctcaccaagttactccccttccagcccacgatacacaccacagtctccaacctataccccaagctcacccagctacagccccagctcgcccagctacagcccaacctcacccacaagtacaccccaaccagtccttcttacagtcccagctccccagagtataccccaacctctcccaagtactcacctaccagtcccaaatattcacccacctctcccaagtactcgcctaccagtcccacctattcacccaccaccccaaaatactccccaacatctcctacttattccccaacctctccagtctacaccccaacctctcccaagtactcacctactagccccacttactcgcccacttcccccaagtactcgcccaccagccccacctactcgcccacctcccccaaaggctcaacctactctcccacttcccctggttactcgcccaccagccccacctacagtctcacaagcccggctatcagcccggatgacagtgacgaggagaactgagggcacgtggggtgcggcagcgggctagggcccagggcagcttgcccgtgctgctgtgcagttcttgcctccctcacggggcgtcacccccagcccagctccgttgtacataaatgccttgtggcagagctcccggtgaacttctggatcccgtttctgatgcagactcttgtcttgttctccacttgtgctgttagaactcactggcccagtggtgttctcactcctaccccacccaccccctgcctgtccccaaattgaagatccttccttgcctgtggcttgatgcggggcgggtaaagggtattttaacttaggggtagttcctgctgtgagtggttacagctgatcctcgggaagaacaaagctaaagctgccttttgtctgttattttatttttttgaagtttaaataaagtttactaattttgaccaaaagtatgtacatcgagtgcttcattggggttcaggagacccccaggcccctgcctcctgcctgggctgctgcttgatctgttagggggaggggaccaggaaaatgggagggtaccttacagtcagcccacacacagcccctgctctgtgccaggcactgctctgtactgagtttgttatagtcacaacagatgcagctcttgtcctctattaaggtgatattgaccataacagctttttaacttgttttactgattgtcataaataatttggaaaagtgtagaaaagtataatgcagagggagaaaaatgatcacccataatcccaccactaggaggcatactttctttggtattttttcctatacttttcttgagtcactaacaagtgaacaaaaatgtactttgattttggcctcaaaccaagaatgaaaagattatatagatgttgtaatacagaagctgaagtaaaaggacttgggggtaatacgctagttttagccggctatttttccccctttcattagcaccttaatgtggtatcaatgttctacatcctctgcaagtcatttctgatttacttgaggtatttttatttttattttatttttttgagacagtctcgctctgttgcccaggctggagtgcagtggcgcagtctcggctcactacaacctctgcctcttgggttcaagcaattctcactgcctcagccttccaagtagctgcgattgcagatgtccgtcaccatgcccagctactttggtatttttaatagagaagggatttcacagtgttggccaggctggtctcaaactcctgatttcaggtgatctgtccactttggcctcccaaagtgctgggattacaggcatgagccactgcacctggcctgttatctagaaatgtctattttgccttcattcctaaagaatatctttgctagagataggattctggtgtgacagattcattttttgtttttagcacttttttttttttttttaggagcagaggtttaatatgcaaaagatagagaaaagagaacagctcgctctcttgtgggggagaggggcttctgaaagggaagtccctaagatgtcctatcttccggccctcacagtttctagtgagaagttcacagtctttgggatcatatttcttgtgttatttttctctaaatgctttcaagattttctttttatctctggttctttggtttttgacagtttagctttggtgtgtatattggagttctccagagaagcagaaccattgggagagatatatatcttcctgtgctaataatcacattacttttatatgtgattatatatatacatatatatttttttctatttacttgagcttccccacagcaaaaatgaggggttttgtcatgggaattcgctcaaacgattacagggaccaagaagtttcacaatctgccatctgtaatctggagaaccaggaagctggtggtgtaattcagtcttgagtccaaaggcctgagaactggaggtggggtggtggtggcagtggtggcagtggtggcgctggtgtaagtcctggagtctaaagacccaagaattgggagcttctaggtccaaaggcaggagaagttggatgtctgagctcaaggagaggactcacccttcctctacctttttgttctttccaagccctcacttgattggacaatgcccacctatggcggtgcaagagaaccttactcagtctaccgattaaaatgccgacctcttcaagaaacactctcactgacacacccagaaagaatgtttttccagctctctgggcgttccttaactcagtcaagttgacgcgtaccattaaccaccactgtgtgcccaggcatagttttctcatttatcccgtttgagtttccctgagatttttgattctgtaaaattgccttttagcgtatttgggaagtttttagacttttttttttttttttaagatggcgtctcggtctatcgcccaggctggagtgcagtggcgctatcttggctcactgcaacctctgactcctgggttcaagcgattctcctgcctcagcctcccaagtacctgggactacaggcgcctgccaccacacccggctaattttttgtaattttagtagagacggggtttcaccatgttagccaggatggtctcgatctcctgactttgtgatccacctgcctcagcctcccaaagtgctgggattacaggcgtgagccaccgcgcctggcctagacattctttcaaatactttttttctgtcctattctttccttctgagaattcagtagcatgcctactagactttttgatttccccccccacaggtttttgaggctcttaatcatttttgcaaatttttctctcattcttttttcgagatggagtttcactcttgcccaggctggagtgcaatggtgccatctcggctcactgcaacctccgcctcctgggttcaaataagtctcctgcctcagcctcccgagtagctgggactgcaggcatgcaccaccacacccagctaattttgtatttttttttttttttttttagtagagatggggtttcaccatgttggtcagactggccttgaactcctgacctcaggtgatccagccatctcggcctcccaaagtgctggggattacaggtgtgaaccactacgcctggtctggggggcacattttattttattttatgttattttttatttcatatggtatgttttatgttatgtttgttatgttattttgagacggagtcttgctctgtcgcccaggctggagtgcagtggtgtgatctcggctcactgcaagctctgcctcctgggttctcgccattctcctgcctcagcctcccgagtagctgggactacaggcgcccgccaccacgcccggctaattttttgtatttttagtagagacaaggtttcaccatgttagccaggatggtgtcgatctcctgacctcatgatccgcccgcctcggcctcccaaagtgctgggattacaggcgtgagccaccgtgcctagcttggggggcacattttaatcagcaaaataacaaaaaccttcaagctatgaaaaacatgtcattaagtagattgaaaatagaaaactagaaggcagagcactgccttgtttaacctcagtggtgaacgtgtgcgttgggtgactcaaatttttcaccagtttgctcatgtctgcaaatggccacaattattgattttaaagttataaataaattttaggaagtaggtgaatttgcaaatattaaatccacaaacaataagaatcaactgtatgtatgtgtcttctctttttctctccctctctccattttttcattcatcctgagaatatatataatttttttgagataggttttcactctgttgcccagactggagtgcagtggcgcagtctcagctcactgcagcctcaacctcccaggctcaagcgatcctcccactcaggctcctgagtaggtagaactacaggtgtgagttaccacgcctggctaattttattttttgtagagacaaagtctcactatgttgcctaggctagtcttgaactcctggactcaagcgatcctccctccttggcctcccgaagtgctggaattacaggcatgtgccaccgcacccagctaggttcatttttgtttttatttatttatttatttttgagatggagtttcgctcctgtcgccaaggctggagtgcaaggacacaattttggctcacctcaacctttgcttcctgggttcaagcgattctcctgcctcagcctcccaagtagctggaactacaggtgcgtgccaccacacccagctaattttttagtagagactgggtttcagcatgttagccaggatggtctcgatttcctgacctcgtgatccacctgcctcggcctcccaaagcactgggattacaggcatgagccactgtgcccagcctcaagccataggtttttatgctacatgggactctatcatcattattccaaatcattttctaatttccattttgatatgtttgatctgtgagtgatttattttgtacatatatatatatatatatatatatatatatatatgtatttttttttcttttctgtttttcgagacagagtctcactctgtcacccaggtttggagtgcagtggtgcaatcccagctcaaagcaacctccacctcccaggttcccatgattctactgcctctactgcctcagcctcctgagtagctggaattacaggtgcacgccaccacgcctagctaatttttctgtatttttagagacggggttttaccatgttggccaggctggtctccaactcctgacctcagggtgatccactcaccttggcctcccaaagtgctgggattacaggcatgagacactgggcccgacgaatttttcaatttcatcttacttgtcttactttgtatgcttaatgtttttagttcattccagcttaaaattctaatactttcctggtgaatggactcttttatcattgtagcaatcctctttatctcaagaagtgctttttaacttagggtcaatttttttttgtttgtttttgttttgggatgaagtctcgctctgtcacccaggctggagtgtggtggtgcaatcttggctcactgcaacctccatccctcaggttcaagcaattctcctgcctcagcctcccaagtagctgggattacaggcgcctgccaccatgcccgggtaatttttgtatatttagtggagacagggtttcaccttgtttgccaggctggtctcgaactcctgacctcagatgatccacccacctcagcctcccaaagtgctgggattacaggcgtgagccaccatgcctggccaacttagggtcaattttatctgagatagctacaccagtttttctttcagttggaatttttcaagtatattattcttccatctttctgtatctttacatttaagcctcttataaatagtatatcatgggcttttgttttttataccttcttacaaccaattgtccttttattggagaatttagcctatttgcatttagtatgactactaatacatttggattttcttcctactctcttatttacttcacagttatctttctcacttttcctcctttcctctcatgccttccagagggttaatgttttttctcgtttcattattttctcactatatgtttaaaatctatgctttatgtctattttgtgtgtgtgactaccccaattattatttttcttttttttgtattttattttttaaaaatttaccaaaattattttaagctatataagttgaagtctaaagttagaaatataggctggatgcagtgactcatgcctgtaatcccaacactttgggaggttgaggcaggaggatcacttgagtccaggaggtcgaggctgcagggagccaaaataatgccactgcactccagcctgggtgacagggtgaacgctgtctctaatcaatcacaatcaaatcaaataaataagataaaatatagttaaaaaacacagttactctcttgctgaatcatactaggatcttacaatgcttcaattctgaacccttctttcatttaaatgcaactactgtctagtatttgtactatgacaattgtcataaataagacattattatattttactattaaagttagtttagatttccttagatatctatcaatatctttttttctttttgagacggagtttcgctcttgttgcccaggctggagtgcagcagcgagatctcggctcatcgcaacctccgcctcccaggttcaagcgattctcctgcctcagcctcccaagtagctgggattacaggcatgagccaccatgcccagctaattttgtattttttagtagagatggggtttctccacgttggtcaggctggtctcgaactcccgaccttgggtgatctgcccgcctcagcctcccaaagtgctgggattacaggcctgagccaccgtgcctggcttcaatatcttttctcttaattccttcttgcatctcaaattttctttcatccgggatcatgtttcttctgtctgatgcatgtcaaacaatttcctttaatgagttatgttggtcttaatctttttcagcttttgtttatccgatgatatatttatttcactctcattctcttttcataacagctttattcagatataactaattatgatacaattcacctaaagtgtagatttcaatggtttttgaacatattcagacttgtatgaccaccacaatctgttttagaacagcttaatcaccccaaaagaaactccatatactggccgggcttagtggctcacacctgcaattctcccagcactttgggaggccgagcaggcggattatgaggtcaggagttctaccagcctggccaacatggtgaaaccttgtctctactaaaaatacaaaaattagccaggcatgctggcgcatgcctgtaatcccagctactcaggaggctgagacaggagaatcgcttgaaactggaaggcagaagttgcagtgaactaagatcgcgtcactgcactcccggctgggcaacaagagtgaaactccatctcaaaacaaaaaagaaaaaaaagaaaagccaggcgcggtggctcgtgcctgtaatcccagcactttgggaggccgaggtgggtggatcacgatgtcaagagttcgagaccagcctggccaacatggtgaaaccccatctctagtaaaaatacagaaattagctgggcgtggcagtgggcatctgtaatcccagctacttgggaggctgaggcagaattgcttgaacctgggaggtggaggttgcagtgagccaagattatgccactgcactccagcctgggtgggtgacagaggaagactccatctcaaaaaaaaaaaaaaaagaaaagaaaccccatatacattagcagtaactcttcattttgtttagcccccaagccctgcactaggcaatcacgaacctgtgttctgtctctttatatttgcttattctggtcacttcatattcatggcattgtagaatatgtggtattttgtgattggcttctttcacttatataatttcaacattcatacattttgtagcctatatcagtaattaatcactttttgttgtcatgtattccattgtatgtgaatataccacattttctttcttcattcatgagttgatggactttaggttgtttcctttttgtttttgtttttttttgagacagtgttgctctgtcacccatgcttgagtgtagtagtgcgatctcagctcactgcaacctcggcctcccatattcaagcaattctcctgcttcaacctcccgagtagctgggattacaggcgtgtgccaccactcccagctaattttttgtatttttagtggagacaggtttcaccatgttggccaggctggtctcaaactcctgacctcaggtgatccacctgcctcggccttcccaaagtgctggaattacaggcatgagccaccgcgcctggcctagtttttttttttttaactaatatatataattgtggatctctttgtgtctattctgcgtagagtttgttgagctctttggatttgtacattaatgtttttcagtaagtttgggaagtttccagccaattatttctttgacttttatttgctcgttctctgctctgcttctggtatttcccttacatgtatggtggtgtgcttaatggtgtctcacgtttctttgatgctctgtttatttttcttcatttttttttttttttttttttgagacagagtctcactctgttgcccagactggagtgcagtggcacaatctcggctcactgcaacctctgcctcctgggttcaagtgattctcctgtctcaacctcctgagtagctgggattacaggtgccaccgggcatgccaccatgcccagctaattttttttttgtatttttagtatagatggggtttcatcatattggtcaggctggtctcgaactcctgacctcaggtgatctgcccaccttggcttcccaaagtgctgggattacaggtgtgagccaacgcgccaagcctttccttcattatttttatttctattctttggattgcataatattatgatctatcttcagattgtaattctttcttctgttaggtgatactgttgcagaaaaaccaggttcttatcacacgaccaggaaaatttacgcacacggacacattgaacagtgggtagagcggggtttattgggtgaaaaggaaaaaaaaagaaagaaactctcagcaaagtgagagggcagtcctgcgagcaggcccccactttacagattgaatcccaggccaccacacaggaactgaagaggccaggctccacctggatgcaaacggcgtgaactaacatggctccaccacattcttctagtacgtaggctggtcggagattctctggggacccacccccttatctgcttcctgcatctatcattgttaatcccgcctctaaagaagtccatctaactgctgttagaacaaggataaggataaagaccaagaccggtcttaactgcttcctgctgacagggggcgctgttttgagaagatggctgtcggagctcccttagaggcctatctaagggtccctggcaaaaggggccgccatcatctgaggctccagttgcatgaccatttggactttgatggcctgaagccgagaagagacaaaccaggttgtcagaaaacttgtatcaaggcaaaataaggtgggggtaaggacagcttaaaaatcctgaggccttggctgggagtggtggctcacgcctataatcccagcattttgggaggccgaggcgggtggatcacctgaggtcaggagttcaagaccagcctgaccaacgtggagaaaccctgtctctactaaaaatatgaaaattaactgggcatagtggcacgtgcctgtaatcccagcaggagaattgcttgaacccggggaggcagaggttgcagtgagccaagatagtgccactgcactccagcctgggtgacagagcaagactccgtctcaaaaaaaagaaaagaaacgtccaggtgcggtggctcaagcactttgggaggccaaagcaggtggataaccggaggtcaagagttcgagaccagcctggccaacattgtgaaaccccatctctactaaaaatacaaaaaaaaaaaaattagctgggcacagtggcaggtgcctgtaatcccagcgactcgggaggctgaggcaggagaatcgcttgaacccaggtggaggttgcagtgagccaagattgtgccattgcactccagcctggatgacaagacagaaactccgtctcaaaaaaaaaaaaaaaaaaaaaaaaaattcctgaggccttttactggtttgcacaaggagtggaaggccaaaagcctgacttataaaaaatccactttaccctttttaccctttcaccagcatgtcaggcttctgggttcccctcccctgagccccatcctaagccaaccagtctaaggtttgggaatttttttttctttttttcttttttttttttttgagatagagtcttgctctgtcgcccaggctggagtgcagtggtgcgatctcggctcactgcaagctccgcctcccgggttcacgccattctcccacctcagcctcccgagtagctgggactacaggcgcccgccaccacgcccagctaatttttcatattttttagtagagagggggtttcaccgtgttagccaggatgttctcgatctcctgacctcgtgatccgcccatcttggcctcccaaagtgctgggattacaggcgtgagccaccgtgcccagcaggattgggaaattaactcttctcagtttggaggatgcatctgaggggaatgtcccgtagtatggagacacaattacctatcggtgaagagaggacagaggagaaaaaaggaaaaaaagaaggcgttttcctcagaggagtcccaagggttcaggacgcattcgaaaggagcacagacagcggggccagtggctcacacctgtaatcccagcactttgggaggctgaggcggccggatcacctgagatcaggagttggagaccagcctggccaacatggcgaaaccccgtctctactaaaaatacaaaaaaattagctgggcacggtggctcacgcctgtaatcccagctactcaggaggctaaggcaggagaatcgcttgaacctgggaggtggaggttgcggtgagctgagattgctccactgcactccagcctgccagcctggagtgcagcgacaagagtgaaactccgtctcaaaaaaaaaaaaaaaaagaaaaagaaaaagaaagaaaggggcacagactgaagatgaatggctactcatctagaaagaggggaacaggtctgtccctggttcctttcccttcctagcaaatacccagagtacgtgagggagagaaagtgaggtgtcactccttctctcttctgtccttgtatcccggagtcccagcaaccatgacaggttcccacccatgggtgtcaaagtggttttcactcatattaacagggggttctagggggtgggagtatttactcttacccacatatgccctatctcccctgctgtcagtagcttttaaattccctagacctcatttatgccacagatactagcatgatctttatccatggaacgggaagcttggcttaatcagcaggaattaattatgctcacctgcactgtgccttttaacttccattatcacctgcctctggatccctcagatccagttttctttctagggctttgacctgaagcttgaaattgagtttgggacaaaaatgttttttggggggttgtgtggactccttatcataagctgaatgctagggtgaagatgtgggattgagtcttcctccaacaaaggagagaaaaagatgtcttgtgacatggccagataactggtggctatagttatgcttcctgggatttgggtgcatgaggcttggcttttgttagctcccttggtcttactttcccacagaggaaacctctgggttatgggcactgtatttattcccatcacctggaaggatttgcaggataattgctcagaactagaatattgatccagatttttacattacccatccctcttgttgtttctgagctgcagccagagatccctggttggtttacaggaataagcagggttagtttaaaatgtaggcaaaacttagaaacaactaatgagtctaaactttaatgacaaatatataagttttgaaatataatttctctctatatatttttttaatcttttttttttttttttttttttgagatggagtttcactcttgttacccaggttggagtgcaatggcacaatcttgcctaccaggttcaagcgattctcctgtctcagcctcccatgtagctgggattacaggcatgcgctaccatgcccagctaattttgtatttttagtagaggcagcatttttccatgttggtcaggctggtcttgaactcccgacctcaggcaatccacccacctcggcctcccaaagtgctgggattacaggtgtgagcccccacgctcagcttcactccctcccctctttccatctcccctctttctcccctcacctccccttccctcccctcccctctcctctcctctccttcttccttacagagtattgctctgttacccaggctggagtgcagtggcacaattttggctcaccacaacctccacctcctcggttcaagagattctcgttcctcagcctcccgagtagctgggactacaggcgcacaccaccacacctggctaatttttaatattttcagtagagacggggtttcaccatgttggccaggctggtcttgaactcctgataccaggtgatccacccactttggcctcccaaagtggtgggtttacaggcatgagccaccatgcccagccttctagtcctcatttctgttaaaaacaaatcaagttagaactcagttgtttgcaaaatcgactttaatcttatacttggcctgattatttgcataaagtgcagcaaaaataattatttctacataggccttttagattgactttgatggaactctgttccacaaggaatttcagataagaccttttaaagctcaggccagccatgagtttgtatcctcaaatacctgtgagttgggtaaactcctctcttcttgaggtcccaagagcatgtgttttctgggcctgttggaaagtgacattctttactcattgcaggttaggaaccctgtatggagactgtgtagacaagggcatgaagccagttttaccaaaggacttttattggctctgcaagttgagattgactccttaaagggaagcataccattccagtcaaagccttggtaaaacaaccagtttctccaattgcatcctgttgcaaaagaaaatggattcttactgcactgatacaaacaactatattgtcataagttatgaatactcatagatagtttctaaattctagaggaaccaggcagagagaaacaaacatgctccaaattttgttcacaggagtataccctactcaattttttttttttttgagacggagtctcgctttgtggcccaggtgggagtgcagtggcgtgatctcagctcactgcaagctccgcctcccgggttcatgccattctcctgcctcagcctcccgagtagctgggactacaggcgcctgccaccacaccctgataattttttgtatttttagtagagacacggtttcaccgtgttagccaggatggtctcgatctcctgacctcgtgatccacccgccttggcctcccaaagtgctgggactacaggcgtgagccaccgcgcctggccaccctactcaattattaaaggctgtaaataattcctaataattttcctcgactctgaaaaatgaaacaaggatcagcaatgttccaagcaaaagtccagaagattacttcagttttctattagttcagtccattcagttaactcttgttttgcttgatattcatgaacatttcagctcttcatgagtcctgtacatttttcctgtgtgccaatgtcacaatctccaaagttatcagaaactgatatttgagcatacttgtcagagtcctatagcttatttttttttttaattttgctttaagttcttggatacatgtgcagaacatgcaggtttgttacataggtatacatgtgccatggtggtttgctacacctatcaacctgtcatctaggttttttgttttttgttgtgtgtgtgtgtgtgtgtgtgtgtgtgtgagagagagagagagagagagacggaatttcgctcttgttgcccatgctggagtgcaatggcatgtgatcttggctcaccacaagctccacctcccgggttcaagtgattctcctgcctcagcctcccaagtagctgggattccaggcatgtgccaccatacccggctaattttgtacttttagtagagacggggtttctccatgttggtcagcctggtcatgaactcctgacctcaggtgatctgctcgcctcggccccccaaagtgcagggattacaggcgtgagccaccgtacccagcctatcatctaggttttaagccccacatgcattaggtatttgtcctaatgctctccctccccttgtcccccactccctgacaggccttagtgtgtgatgttcccctccctgtgtccatgtgttctcattgttcaactctcacttatgagtaagaacatgtggtgtttggttttctgttcctgtgttagtttgctgacaatgatggtttccagcttcatccatgtccctggagaggacatgaacccattctttttatggctgcagagtcctgtagcttatgaaaaggatcaaaacaagacaacaattgtctgtgaataacaaaatgtccagggtagttacagttagaaacacaattgacaaagaactttggttatctctgtggtttacaataacttaacaaccttaattatgactgatagcatatactttagacattagaattttagaaatcccacacaattttggaacatacattagtattattcaccagaatataacctaaagaagattggacaccattttggcaatcccatgtaactaaacttgtcaaataattctgtttacctctcttttggatactgcaggggccctctgtagcatccaaaagccagccatcaggaaaggcaattttgtaatggaagtttaatttctggaagcctgttaaatatgttagaggtttaaaacacttgatgttatgaaatagaattccaaattaccacaagttatttattttgctaaaatgactcagaaatttaaaagagcaaaaaccttttataaccctttacaaattttgttaaagagcagattagtgccttatgagtgtcttgttgtgcttttatttcaatgctcaacttacagaaaaaccatataacacccttttgaatttagtcaatatgttcatacttcacacatagaatttctgggtttttttgtttcgttttgttttgttttgttttgtttggagacagtctcactctgtcgcccaggctggagtgcggtggtgtgatctcagctcactgcaacctccaccttctgggttcaagcaatcctcccacctcagcctctcgagtagctgggattacaggcgtgcaccaccacacccggataatttttgtattttagtagagatggggttttgccatgttggccagactggtctcgaactcctgacctcaggtgatctgcctgcctcagtctcccaaattgctgggattacaggcatgagccactgcacccagccaattttaatttttattaattaattattattattattattattttgagacagagtctcattatgttgaccaggctgttctcaaactcctgggctcaagtgatcctcctgcctcaacctcccaaagtgctgggattgtaggcatgagccactgtgcctagtcttcattacttcttgaagcatggtttccttagttatttgaacatatttataataagtgctttgaaatcttttccattaaatcaaatgtctgggctctctcacgggcagtttttgttgcctacttttttgctcctgtgtatatgtcacgctttcttttttctttgcaaatcttaataatttttttggcctaaaactggatatgtaaaataatatattaggctgggcatggtggctcacacctgtaatcccagcactttgggaggccacggtggacagatcacctgaggtcaggagttaaaaaccagcctggccaacaaggggaaacctcatctctactaaaaatacaaaaattatccaggcgtggtggcgcacctgtaatcccagctactcgggaagctgaggcaagagaatcactgaaatccaggaggctgaggttgcagtgagctgagattgcatcactgcactccaacttgggcaacagagtgagacttcatctcaaaataatgataataatatattagcaactctaattcctctttcctctctgtagggcttgtttctgttgttttttgcttgtttgcttagtgacttgactagattattttagtgaagtctatttcccccatattgtgaagtctttggtgtcattcttcagaagatgtagccttgagtgtacctgtagtcacagtaagataatagtggttttagcagggctctctttgtctctttccccacacccagctgttaagctccactaactgcaagctgattgctctattatttttgacaatgtcctgaggcataaattcctccacagtctgattcaattaatttctggcagggatggtttttgaggcaagtctttgagttttgttctgacctcaagagtgctcttcttaggatctttcccctattttatatctttaaatataaaaggcactggcttttaatatttaacttaaccactcaatcagttaagttccctctggtgatctagctggcttatggcttaacttgttgctcttaagagaaactagagttgacccttgaagaaccagtgtctctaaggattagagacactgacccctctgcagagtcaaaaccgcatgtatacttttttattccctctcccccgccccgcaaaaaaaaaaaaaaaaaaaaaaagcagaatgaaaaaaacaaagaactgggtgcggtggctcctgcttgtaatcccagcactttgggagggcaaggtgggtggatcacgaggtcaggagttccagaccagcctggccaacatagtgaaaccctgtctctactaaaaatacaaaaattagccaggcatggtggcgcatgcctgtagtcccacttactcgggaggctgaagcacgagaattgcttgaacccaggaggcagaggttgtggtgagctgagatcacgccactgcactctagcctgggcaacagagtgagaccccttttcaaaaaaaaaaaaagcaaacaaaacacaaacaaacaaagaaaaaggctgtgcgtggtggcccgtgcctataatcccagcactttgggaggctgaggcaggtgcactgcctgatctcaggagtttgagtccagcctgggcaacaaggcacgactccgtctctatgaaaatacaaaattagctcagcatggtggcatgcacctgtggtcccaactactcaggagactgaggcaggaagattgcttgagccaaggaggtcaaggctgcagtgagccatgtttccattgctgcactccagcctgggtgacagagtgagaccctgtctctctttttttttttttttttgagatggcgtttcactcttattgcccaggctagagtgcaatggcacgatcttgggtcaccacaacctcggcctcccgggttcaagtgattctcctgcctcagcctcccaagtagctggaattagaggcatgcgtcacaatgcctggctaattttgtacttttaatagaggcagggtttctccgtgttggtcaggctggtcttaaactcctgacctcaggtgatctacccgcctcagcttcccaaagtgctgggattacaggtgtgagccaccgcgcccggtgagaccctatctcaattttaaaaaagcaaagaaaaagaaaaaaaatttttgactccccaaaaacttaactactaatagcttcctattgactggaagccttacgaattacatagtagaagactaacatgtattttttatgttttatatatatactatattgttaaaattaagtaagctagagaaaagaaaatgctattaagaaaatcatggggtaggcatggtagttcatgcctgtaatcccaacactttgggaggtcaaggttggaggatcgctcaagcccaggagttagagaccagcctaggcaacatagcaagaccccatctctataaataatttaaaaatttgccaggcatggtgtcatgcgcctgtagtcccagctactctgaaggctgaagcaggaggaccacttgagtccaggagttcaaggctgcagtaggatatgttggtgccaccaagctccagcctgtgtgacagataaaatcataagggctgggcgtggtggtactgtggcaggccaggtcttactaatgcaggcctccatagcaactgtttcagtactgattgagtagttaagttaaatattaaaagccagtgcctttatacaaaggctggaacgtaagaaaagcccaccaagagttttgcctaggcctttcctgggccttaaagcatgacaaaataacgaaggaattcttaacaagacccatttaggattcaataaattttactgtgggtctgaagaaactctccaggcctccacaaacaagtttactgggggtctgaaggaactccccaaacctccatgatttagcaggaaacaagataagggtaatcaccccagcacctggacccatttagattaagtaaatttactgaggctccagaggaaggtcttcaggactcagaccttagttatagattaaaagaagttaaccagctcggcacagtggctcatgcctgtaatcccagcactttgggaggctgagatgggcgaatcatttgaggtcaggagttcgagaccagcctgaccaacatggcaaaaccccgtctctactaaaaatacaaaacaaattagctgggcatggtggcacatgcctgtagtcccagctgctcgggaggctgaggcaggagaattccttgaacccaggaggtggaggttgcagtgagccaagatcgtgccactgcactccagcctgggcgacagagtgaaactgtgtctcaaaaaatatatatataaagaagttaatcacgtatgtctttagaggaatgcacacttacacatagacatatagctcagaaggtatataagctctggaaaactttataattttgagtttgtctggtgataatttccagaccatctccctgtaaccggttgcacaaataaaaactctattcctccccagttcatctgcatctcattactgggccacaagaaatagcagcccaaccctcagtttggtctaggaacaacagtacatgtttataatcccagctattcaagaggctaaggcaggaggattgtttgagcccagaagtttgacaccagctttggtaacatagtgagaccctgtctcttaaacaaacataaacatagatatgtgtgtgtgcgtgtgtgtgtgcaggtgtgtgtgtgtgtgtgtgcgtataattaaaaagataaaaatataaaagagacaggaataatacaaggtggtcacaggagaataaaaatttcaggcaggctgggcatggtggctgacacctgtaatcccagcactttgggagtccaaggcagacggatcacagggtcaggggttcaagaccagcctggccaagatggtgaaaccctgtctctactaaaaaaaaaaatacaaaaatacaaaaattagccgggtgtggtggtggaagcctgtaatcccagctactcgggaggctgaggcagggaattgcttgaacctgggaggcagaggttgcagtgagccaagattgcgccactgcactccagcctgagtgacagagggagactccgtctcaaaaaaaaaaaaaaaaaaattccaggcagcattttcacatgactaggggctgtgggctgataagaccctaaaaaacagggtgtgggccaaactggctaagacagactgggcccaacatggtgctgggttcaacctaggtttcacctaggacctcattacatgctcattaacatgctaaacacacacccaccagcgctgggacagttctgagaacacccgtatttcgtatacaaatgtgtagcgccacatttctgagaaatctccacctttttttgaaattttcatgaatattgcaccccttggttaaagaaatccgtaaaggtagcagtccccaacttggttactcaagactccgtgtgaatacgcctgtattccccttgcttgagcaggtacatctccttagtttcactattttctgactcatcctagaattcaacgatgtcaagagcctggacactggctggggtcaaggtcccaccgccatctggcgatctcctccagcccactggtatcataagaaagtgaaaatatatttactattcaccaagcgcaagtggatcatcacaaagatcttcatccatatcttcacattgagtaggctgaggaggaagaggaggaagaagaggggttgatcttgctgtcttagggtggcagaggcagaagaaaatccacatatagctgggcacagtggcttacgcctgtaatctcagcactttgggaagccaaggtgggcagatcacaaggtcagaagatcaagaccaccatggcccacacggtgaagccccgtctctactaaaaatacaaaaaaaattagtcgggcatggtggtgtgcacctgtaatcccagctacttgggaagctaaggcaggagaatcgcttgaactcgggaggtggaggttacaatgagccaagattgcgccactgcactctagcctgggtgacagagcgagactccagctcaaaaaaaaaaaaaaaaaatccacatataagtggacttgtgcagtttaaatccatgttgttcaagggccaattctaccagccttctcttatttgtttatcaccaaaatctccattattttagcgtgcgtccatagacttgatcttccctccactctatttcaaataaagtcagtttgtttgtagacactgtcagatcttcacgttcttatgcactgcctctccccctaggcaaaatttctgagccactactctggatgttgggcaggggtggtagccatgatcttctcagcttgcctttccttggcatagagcctctgcccaatgagtgagctggggtgaggacaatcagggttccagtattcttggcccaccataggtggggtgaagcctctgtccactgtattccctgattgggagttgaggggagaggcagccctatctttttgctcacacctgggcagactggaacttccatcagacagagcttagtgggagtgtggggtgtggatagagagtaacttacggagcaagttccagcctctcactgttcttaacaagttttttttttttttggacatggaatctcactctgtcgcccaggctggagtgcagtggcaccatctcggctcactgcaacctccgtctcccgggttcaagcgattctcctgccttagactcccgagtagctgggactacaggcatgtgccaccatgcccagctaatttttttgtatttttagtagagacagggtttcgccgtgttagccaggatggtctcgaactcctgacctcaggtgatctgctcgcctcggcctcccaaagtgctgggattacgggcgtgagccaccacgcccgccctttttttttttttttttttttttttgatacagagtctcactctgtcacccaggctggagtgcagtggtgtgatctcagctcactgcaacctccctgtcccaggttcaagcgattctcctgcctcagcctcccgagtagctgggactataggcacgtgccactacgcttagctaattttttgtatttttttttagtagagacggggtttcaccgtgttagccaagctgatctcgaactcctgacctcgtgactcacccgcctcagcctcccaaagtgctgggattacaggcgtgagccaccgcgccgggtcataaactgctttctttttccttggaactttatctgtgggagaattttgagtctttgattgaagtgactttcctctagagagaatttgtatttgcttctgcttggcccctgggtgtgccaccaacccagaaaccctttcgattctgtcgttggcattttcttgggctactcacgcagcatatgttcatttgagcacaaactatgggaggactgatttcaaattctcaggggagatttttttttcttccatccaaggttaatacaggcaagctttcttgctgcttccttctgtgaaatgtgttttgtttttgttttatcagtgcctttatactaaggtagtaggagcctccaaccatatgcagaaatctctcattctctcttttttttttttttggagatggagtttcattcttgttgcccaggctggaatgcagtggcacaacctcggctcaccgcaacctctgcctcccaggttcacgccattctcctgcctcagcctcctgagtagctgggattacaggcatgcgccatcatgcccggttaactttgtatttttagtagagatggggttttaccgtgttggtcaggctggtcttgaactcctgacctcaggtgatctgcctgcctcggcctcccaaagtgctgggattacaggcatgagccaccacacccggccaagatttattttcaaactattgtaattaagatggcctagggccgactctgtggctcacgcctataatcccagcagtttgggaggctgaggtaggcagatcagttgaggttaggagtttgagaccagcctggccaacatggcaaaaccctgtctttttttgtttttgagacggagtctcgctctgtcgcccaggctggtgtgcagtggtgcgatctcagctcactgcaagctccgcctcctgggttcacgccattctcctgtctcagcctccagagtagctgggactacaggcgcccgccaccacacccggctaattttttgcatttttagtagagacggggtttcactgtgttagccaggatggtctcttatctcctgacctcgtgatccgcccaccccagcctcccaaaatgctgggattacaggcatgagccaccgcgcctggcctattttttattttttaaggctggtcagtgaagcagtgggagtggagaaggtacaaagaaatctgtaaccggttgtgatcaattagttgtaaacaccaatgcactcagaccagcatatggtgctttgacacacagaactcaaggagccgcaagatctctctgaccttgcctgctcaccaccatctttcccaaagtgaagttcctttatcggcctaaaatccagacccaccagaagtaacaattgtttttttcttctcttctctgtaaaccaagaatgtaacctcacctgaaaaaactctttcacaaaataatgtacaagttcatctccgttccccgatccattcattcttcctagtagtcccctcaacagaactcctcttctccctcctcccataacctgttttgccagtagggtatgtaagcttcacaaccacactgggaggtgggcaatcattctgtggttctcccccaagtacactttaataacatttatacgccttttctccaattaatctaccttttgtgagttgatttttcagcaaaccttcagagggcgaaggggaagtttcccttggtccctacaagccgtatgcatgtttgcaggcgggtagaggcttccaccttctgcaggggccccaaagccggaactgtacattcccagcatcccttgcagctgatcgggaacctgtgaccaaggataagctggggaaccaactcccctcagactttggtttgaaggcaagtgaggccaacaaggaaataacaagatcctcaatcctggggtggcagcggactccagcatccagggccagtggtgctggccgtgctggcatgagtgtttgtcctgcagggcctgaggaggctatgtcctcaccagaccagctctacagtgagctttgcccctgttcatgctgtagttgccttgacccagcttgtttcctgagcctggttatcctgccttcctgatagttctgggaggtacctgtgacgttccaataaactccttttctgtttaggtctagggatgctttttgttgatttcaactgaaaagcctaacaattcagccacagacaagggcagaggtggaggcctcagtcctacttgtcccagtgttacagcctaacagattcttcttgtctgctgcacagataaagtcaattcactgagacagtggtgttgcagcagagaaagagtttatcatgagtcagccaagtggaaggataggagatttttctcaaatccacctccccaagaacttggaagttagggtttttaagaataatgtggtgttgggggctagggaaggggcgctgctggctgggtatgaaataatagaagtgtccaaactgtcttctccgcactgagtcagtttctgggtggggggtcacagtgatacagaagagctgggctcccaggtaaaccccacccttgatcctggaactctagccctaaatgaaaacagctgaccccgttttcccacccaaatgttgcctttttggcctgctccgccccatcctgtgcccataaaagacttcagctggcagagcaacacaagcagctaagtattgaggatacaagcagctgagtggcgagcagagaagcatctgagcgtcggagactacagatagacgcggctaacttcagacattcaagtggcctgattcttcctggatgctggatggacagaacctgggtgctgagcgggtaggggctgccaccttgaccctccgctgagctggttggtacttggctgttcctggatggcagagctgaaaaagcatcggtcgtaacactcttggacgctgctgcggggctgcacacagcctgctcccaccagaaaggagtgactggctggttccggcatttgttcgctccttactgcactcactcgctcacgtgccccctcccacgaggagtggtcagcggtgggctgagttaaaagagccattccagttcctgcccgtgaggggggtcaagggaactatcccatctcatcaggatggggtgagtcagctccttggtataagtcacaatccaggcggcttcctttggtctgcccacatgcaaatgtctgaaaaatatctgaaaaagaccaatcttaggttttgaaaatagtgatgttgtctacagaagcaactggggaagttacagatcttgtgaactctggctacatgactcctgagcatcagggaattacagaagaacggctggttatcatttaactatgcctgcattttagtggaattcatgcccctcccataatcctatcattgtggccttttattagtcttacaaaggtggttttagtccccagaggggtcacttctgagaagggactgctgtcatcctttttcaacgttaaactataaactaaattcctcccatagttagcttggcctaggcccagccagatttctttttttttttttttttgagacagtcttgctctgttgtccaggttgaagtgctgtggcgtgatctcggctcattgcaacctctgcctcccaggttccaaaaatgatttttgtggagaatgaggtctcgctgtgttgtgcaggctggttttgaactcctgggctcaagtgatcctcccacctctgcctcctaaagtgctgggactataggcgttagccaccatgcccagcctaggtttcaattagatttagattgaagttagttttgaaaacacacattttgaaaattgttgataattcccttcttctttgcaaaacatttaattatttgtttatttacaatagatgagacatacatatgggaatgagtgtatggtgaaaattctctcaccagaccccacatacccaatttcccttccacagaggaagccactggtaccagtttctgtgtcttcttccagaaacataggccgtgcaaatacaagctctatgagtgtgtgtttacatgtatctttgtatttttgctttattcgcttaacaatatatctcagagcttatttctttcatagctgcacgtatgcatttggttttgtcatataaataaatatatatatatatatatatatatatatatttttttttttttttttttttttttaagagtctcactctgttgcctaggctggagtgcagtggctcgatctcagctcactgcaacctctgcctcccaggttccagcgatgctcctacctcagccgcccgaatagctgggattacaggcatgcgcaaccatgcccggctaatttttgtatatttagtagaggcgggttttctccatgttggtcaggttggtctcgaactcccaacctcaggtgatccacccaccttggcctcccaaagtgctgggattacaggtgtgagccaccgcgcctagcctctccctttcttccttccttcctttctctctctctttctttccttccttccttcctttttttctttctttcttttttttttttttttgacaaagtcttgctctgttgcccagactaaagtgcagtcatgagatcacaggatcttcccacctcagcttgctaagtagctgggactacagggacaggccactgcatctggctaatttttaaattgtttgtagagacacgatctggttatgttgcctggatagctggtctcgaactcctgggctttaagcaatcttcctgcctcggtctcccaaagtgtttttgtttgtttgtttgtttgtttgggtttttttttttgagacggagcctcactctgtcgcccagactggagtgcagtggcgcaatctcggctcactgcaagctccacctcccgggttcacgccattctcctgcctcagcctcccgagtagctggaactacaggcgcccgccaccacgcccggctaatttttgtatttttagtagagacggggtttcactgtgttagccaggatggtcttggtctcctgaccttgtgatccacccgcctcggcctcccaaggtgctgggattacaggagtgagccgccacacccacccccaacatgttgtgattataggcctgagttaccgtgctcggccttggatttctttttagcccatttttccatgtgagacccagagagctggggggcccactcaaggccttgccaaaagccagaagccagtgcagaccagaacccagataccccatttcccacccatcactggccaaagggttaatggctgttggcagacacaatgtttttgttttttattgatttgtgtgtttacatttgacttcccaaaagtgtctgaggcaactgccactgaggtatcaggacttgtgtttgcttttaccgcactccctcctgctggtagggaacccagacagtccgagccatcacagccaaactagaacggagtcaagctgcagcccagggccaaggccgagggaggcaccaagagccaggggccaaaccagatcgatcacatttgccatcaggccaagcaccatgtcaccaccacagccaggtgtgagctacaggcccaagagccaggccaagcagagagtgtccagggcacacgccccaccaatccccagaatacagcgccttctgatactcagccccagctctgggctgaatcttacctggaggcagatatctaatggatggagaggcagggcgcggtggctcatgcctgtaatcccagcactttgggaggctgaggcaggtggatcatctgaagtcaggagtttgagaccaacctggccaacatggcgaaaccccgtctctactaaaaatagaaaaattagctgggcgtagtggcacatgcctgtaatcccagccacttgggaggctgaggcacgagaatcgcttaaatgtgggaggtggaagttgcagtgagccgagatcgctctgtcatccagcctgggtgacagagcaagactccatctccaaaaaacaaacaaacaaacaaaaagaaatggagagctgaggataaaggtaggaaacttgtgacccaggaaactggaatagccagagaaggtacaaaggcggaggagctgatgaaagtcaggctcaggccgcttgcggtggctcatgcttataatcccagcactttgggaggccgaggcggggggatcacttgagatcaggagttcgagaccagcctgaccaacatggtgaaaccccgtctctattaaaaatacaaaatacaaaattagccaggcatggtggtgcatgcctgtaatcccagctacatgggaggctgaggcaggagaatcacttgaacccgggaggtggagtttgcagtgaatggcgatcacaacactgcactccagcctgagcaacaagagtgaaactctgtctcaaaaaaaaaaaaaaaaaaaaaaccaaaaccaagagcaaaacttcgtctcaaaaaaaaaaaaaaaaaaaaacaggtcaggctcaggattgcccacccagccttgcaaccccaccaagccctgcactgttatcaggctgggtcctctcttccttcgtccagaggggaatggaacaggtatggagacaggatgtcattttggagacccaggtttgaattctggtgcttccatatcttggctttggcatttgagcaaaatcattcactcttctatgcaacaaatatttattgagcaactactatggtaaggcattagccaggttctagggaacaaagatgagtaaaccacggtccccccctcatgacatgagagtaggagagtcagatgagcccagatggtaacatgatgagatagtggtgtggctggggcaaaaacaggcatctgtggagctcagagggagcccctatccagggagagaaggcccaggtagagtctcctggggaattcccttggaccacccattcattcaacaaatacataaagtgcctactgtgtgtcaggcactaagcaagacaccagagaaacaatggtctacaagacagacttggcccctgaaccagtagaacttcacggttgagtgagggaggaagaccagaagtgcgagttgtgagaaatgcaatgatggaaacacagcattgtcatcgagactaacacaggggatacatatatgggacaggggacgtgaggcagaatgttgtgatgttggaccaaaattagagtgtccttgtgaacttatgcaatatgtatctatcctatctttgtctgctaaaagtcctcacttccaggaatgctgagtttacccggtgcccagatcttagttgctaaatatccttctccgtgaaagggcaccgttccctgaagaaatggcttctgatctcagggctggtgctgaggaagtacaaggtgcagctggaacatcttattatgaaagaaaggaatggaaggatggaaggaacagagggaggcagggaaggaggggaaggaaggattatagcatttctatatgaagtctatttgtgataccaagcttggtaatataatgaatgaaccagcttaaatatagcacatttatgttcttaaaataaccagtgaaggaaactagaaggcagaatggtaagaggccaaggaaggaggacttcagaatgagagtgggaaacaatcgtagaggctgcaaataagtaagatgagggccaaggtgtatctgctggatttagtacgagagagacctgtggtgatgaccaaccacgtggagcccatgttcactggggaagtggggagaagaggacaggagggtcatcagtgaagagaaggtaggtaaagtctggggaagagcccaggatgatggcacacgcctgtaaacccagctacttgggaggctgagacaggaggatcccttgatcccaggaatttgagaccagcctaggcaacataacaggaccctgtctcacataaataaataactaaacaaacaaacaaacagataaatacagacagacatacatctagggaagacggaggtggcaggtagaagtggaaagagaaagaagcccaggacagggatttgagttgtttgattgactgattaaagcttaaataaagcttaagaattttgaccaaaagtgagtgtggtggtggcttgggggtggcatttagtcctctcttgggtctgttagcaactcatcctggtttttccagaactgtcctggttttagcattgaaagtacctcatcctgggaacctccttagtcccggcaaactgggatggtcactgtccactctcaggctgctactatcaccatattcagtagtcactgccagactgggaaggctaggccatatttattcattcaacaaacttttgctgaccctggaaatacaatgcctgcaaagcatacacagtccctacccttacagactacgtgaaattctttatttgcatttaagtgatttttttttgagacggagtttcactcttgtcacccaggctaaagtgcaattgcacgatctcagatcactgcgacctctgcctcctgggatcaggcgattctcctgcctcagcctcccaagtagctgggatctcggctcactgcaacctccgcctcttgggttcaagctattctcctgcctcagtctcctgagtaagggggattacagacatgcgtcaccacacccggataatttttgtatttttagtagagacggggtttcaccatgttggccaggctggtctcaaactcctgacctcaagtgatctgcacgcttcagcctcccaaaatgctgggattacaggcgtgaccaccaggcatggccttgcatttaagtgatactaatcaagctggatatccaaaaagaaaaacaaaaaagaaaatgacaaagcctttttttcctttagtatcttggttgaaaatgtgaaaagtaagaaaagtgtaaaaaggcaggaataaaaaatattagcagatttcctttcagtatttttcctgcatgtttcccaagttacttcctatcagtgtcctaaaaaatgcaagttaattttaactttggccgcaaaccaagaacaaaaaggttaagtgtattgaattaatttttcaagccaaagttaaaggatctgaggatgatctgctgtctccaaggctccagtccctgtttttttcctttagcaggtgtgatcacacgctggctgagatgagtaatgactttccctctcctcagcacgcttgctgctgtacaatttttttctttttacaaattaaaatgctgcattcacctgataataaaaatcaagtagaggctgggtgcagtggctcacgcctgtaatcccagcactttgggaagctgaggcgggtgaatcacctgaggttgggagttcgacaccagcctgaccaacatggtgaaaccccgtctcttccaaaaatacaaaaattagcctggcatggtggtgggtgcctgtaatcccagctactcaggaggctgagacaggagaatcgcttgaacccgggaggcagaggttgcagtgggctgagatcacaccattgcgctccagcctgagtgatgagagtgaaactccatcttaaaaaaaaataggccgggcgcggtggcttatgcctgtaatcccagcactttgggaggccagggcgggtggatcacgagatcaagagtttgagaccagcctggccaacatggtgaaaccctgtctctactaaaaatgcaaaaattagccaggcatggtggtgcacgcctgtaatcccagctacttaggaggctgaggcaggagaatcacttgaacctgggagggagaggttgcagtgagccaagattgtgccactgtactccagcctgggtgacagagcgagactccgtctcaaaaaaaaaaaaaaaaaaaaaaaaaaaagtgaaaattgtgggcatttgcagtctttgctgccattaagtcttctggatttttctacaggttgactctaaaagttgaaatccagtcaaagatatttacattattatggccacatgaacgttgtttaccctcaggccaaacaatgggctggaattacacttgcttctccacacactccatcccataatccatgtgtcactcaaaggacaatgtggcaagcaagcactaaggccctaaattgatactgtatcaattaaatacaattatgttgtgttatagcttgtgtttcatttattttattttattttttatttttatttttctgagagatgaactctcactctgtcgcccaggctggagtgcagtggcacaatctcgcctcactgcgacctctgcctcccaggttcaagtgattctcctgcctcagcctctcgagtagctgggattacaggcgtgcgccaccatgcccggctaatttttgtatttttagtagagacagggtttcaccatgttggccaggctggtctcaaactcttgatctcgtgatccacctgccttggcctcccaaagtgctgggattacaggcatgagccactgcgcccggcctatttattttatttcaagcagttctcctgcctcagcttcccaagtagctggaacttcaggcgtgcaccaccatgcccagctaatttttgtattttttagtagagatggtgtttcactacatgttggccaggctggtctcgaactcctgacctcaggtgatccacccaccttggcctcccaaagtgctgggattacaggcatgagccactgtgcccggcctatttattttattttttatagagacagggtctcactctgctgccgaggcttcggttcaatggggtgatcatagctcactgcaacctcaaactcctgggatcaagtgatcctcctgacttagcctccacagtagctgggactacaggagcatgccatcgcacctggataatttttcttgtattttttgtagagatggaaaggggttctcactattttgcccaggctggtcttgaactcctggcctcaagagatcctctcgtctcaacctctcaaagctctagggttacaggcgtgagccatgatgccctgcccgtatttatttatttttattttattatttatttattatctttttttttttttgagacagggtcttcctctgcagcccaagctggagttcagtgcccagatcatagctcatggcaacctggaattcctgggctcaagcgatcctcctgcctcagtttccccagtagctgggactacaggtgcacaccatgatgcccagcctgttttgttgcttttttttttttttttttttttttttttgagatggagtcttgctctgtcgcccaggctggagtgcagtcatgcgatctcggctcattgcaacctccacctcccgggttcaagcaattctctgcctcagcctcccgagtagctgagattacaggtgcccgccaccgtgcccagctaatttttgtttttttagtagagacagggtttcaccatcttggccaggctagtcttgaactcctgaccttgtgatccaccgaccttggcctcccaaagtgctgggattacaggcgtgagccaccacaactggccccagctgtttcttatttacattgtgatttcagttttgaaaattttctggagattctaactgcttttctttctttgcatactcttttttttttttttttttttgacagggtcttactctgttgctcgtgttggaatgcagtggtgtgatcacagctcactgcagcctcaacctcccaggctcaggtgatcctcccatctcaacctcctgagtagctgggactacaggcatgcaccaccatgcccagctctatggatgctttttcttgactctctttaagtatattaggtagtactctttgtatcctgaattatctctgtttcctccaatgtcaaattttgtttgttaattttggtctttctttctttttttttttttttgagatagggtcttgctgtgttgcccaggctggagtgtggtggcgtgatctcagctctctgcaacctctgtctcctgggttcaagcaattctctgcctcagcttcccgagtagctgggaactacaggcgcctgccaccacgtccggctaatttttttgtatttttattagagacagggtttcaccatcttggccaggcaggtctcgatctcctgacctcgtgatccacccgcctcagcctcccaaagtgctgcgattacaggcgtgaaccatcgcgcccagccaattttggtccttccttccttccttccttccttccttccttccttccttccttccctccttccctccctccctccctccctcctttctttctttcttcctttctttctttctttttgagacaaggtctgttgcccaggctggagtgtagtggtgcaatcacagctcactgcagcctcaaactcctgggctcaaacaatcctcctacctcggcctcctgagtagctgggactacaggcgtgggctaattttttaaaacttttctgtagagatggggtcttgctcttgcccaggctgatcttgaactcctggcccccagccttggccttctgggattacaggcgtaagccacctgccggaccaattttggtgtttcttttgcatgctgctggtcctcctcagatgcttggcaatcattggtaatgatgggcttcagaacgtgctaccggcacagtgagtgttttaagctgaaggaatttgagaaaaccgcagaagccgaaggatctttcttaccttctcctgcccttcttccctgaaccaggtcatacaacctggaactccctgcccttttcctgaagaagcaaataacagcctcctgcgagaggcgccctccctgcacctgggggaaaggagggtccttatctctgaagacacagggacacagaagaatctgaaccaacaggccttcctgagttccccacctccccgcaggaggtgcccgcacacgcatagccccgtcgctcccgcggccgcacgcaacggacctcgccctggtggtgcacgcccgggctgggcgctcagaggtcgggtgggcgcccactccgttcgctgcgcgcacagcgcccggcgagaggctcggagtttgatcacacacagcgtccggcttcctgtccccagcgccccctcccgccccgtttcccttgcccctccctctccccggcccgatccgcccgccggctccccctcccccgatccctcgggtcccgggatgggggggcggtgaggcaggcacagccccccgcccccatggccgcccgtcggagccagaggcggagggggcgccggggggagccgggcaccgccctgctggtcccgctcgcgctgggcctgggcctggcgctggcctgcctcggcctcctgctggccgtggtcagtttggggagccgggcatcgctgtccgcccaggtgaggccccgctgcgcaccccttcttgggcacatcaggagctgagactgcagaggggccgctgggggccgcgtgggctgaaggcaaggggaagggaggatgggtggagggtgagatgtcaggtggagcggcacagggtgacgctccctccttcccagcaggagcctgcccaggaggagctggtggcagaggaggaccaggacccgtcggtgagtgggcgtgggcgcggtctgcaggctgctggggcatgggaagtgtgcacagccgaggctgcaggtgtgtgcagctgtgccagccgtactcgaggtgtgtgcagggtgtgtgtgaacacagtgcgtgcatgggtgcgtgtctgcaggggtgtgtgtgcgtggtgacaactctgtgtgaggggtttgtgctggggttgtgccacctgagtctgaggtgtttattggctgggggtgacgtggttgtataagatatgtgagtctgcgtggaagaggggtgcggttgtgtacagggtgtgtatcctctgtgcgtggtgactgggtgcgggcatgtgtgcaatgtgccaattgaatgcagggtctgcgttggttgtgtgtgtgggtgggaaagtgtagctggtctagaggaaagggtgaggactggggcctgactcccagcttcacctttgcccggggccccagctgtagttggctgaggggcttaatctgtccctgacttctgtgtctattgctggctggtggctctcctgacaggccccgtatgtctcactttatatctctgggagtctgtggttgaaccctgccctaattcccctaggaactgaatccccagacagaagaaagccaggatcctgcgcctttcctgaaccgactagttcggcctcgcagaagtggtgagcatccctctatcccaacctcaggaagcgggcagagcaaaaaccattatccacagggagaaactgaggcacggagggtgaaaggagttcagagtcatgcagctaaccagccaagactcaaacctagggattctcgccctcctctgaagctccttctgtcatatggatgtgctccttcagaccctaccccaaacaggaaggcagggtggccatgagttagaagaactactgggatcctgatggagactaggcctggcagtcagaggcctgggccccggtaggcaaagagacttaggaatgggatgatggggtggccggatgaccacgtgtccaagtcggcatgcagttgtcctggcccccacctgttatctcggtgtgattaatagcagcttcccgttttgctctcagcagtatcccagtgtggatgacaaattatagtcactctacttactgaggaagatgaggcctgagattctaaggccaggagtctggacaagaataaggatgccagggttcctgagaggggaatggggctgggagagttgctctgggacccccactagggcccgctttgctcatctgtctttccttgatcctcagcacctaaaggccggaaaacacgggctcgaagagcgatcgcagcccattatgaaggtgggtgatgggtgagccatacccaggaggagaggggcaggtggcagagggtcagggcaggtctcaccagccttttcctgtactttacagttcatccacgacctggacaggacggagcgcaggcaggtgagaccccatcccccgacacagcactggcctcctgggaaaagggcccttgaaaacctttgacctcccactcccttcccggccatcagtctcagaaccacagaagccagttcatgaaggtcttggttctctctgtgacccaggcgtgggaccccatgaaagacccctactcttccccagaactctgcccagttcccccagcaaatcactgtcccagctctctccttcagccctcattcttctccaagaagcacttttcattcttttttcttctgtctcctccatattccacgttctgatgatctttttctctaaatgctgctagtgtctgctcatcttttccatttctaccccaccctctacctcagcaccgtgacctcagaacctcaaatccagcctcttgctgcttccccactccacaccctccctacccctccactccatctgacctgtgctgccatgctgagcccctaaacttcacttttcttgtggtattggctctctacatggcttccagtctcttcgtggtctggtctcaacctaatttccctgcactcttatgctgtcttcatgtttgctgcgctgacacccctgctcccggtgtgcctcttctggactttgcacataccatccccctcaccagaatgtctttccactgtgagaggcagggaggcatgaggagtgctcagccgaggggttcacagcagagatggtgagaagtggatgggttcagcctgtgtcctgaagatattactgacttatgggttggaggtgaagaataaaagaaagggaggaatcacagatgacttctagattttttattttttttaagacagtctcgctctgtcacccaggctggagtgcagtggtgcaatctcggcttactgcaacctctgcctcccaggttcaagagattcccgtctcagccttccaagtagctgggattacaggcgtgtgccaccacgcctggctaatttttgtatttttagtagagatggggttttgccatgttttccaggctggtctcaaactcttgacctccagtgatctgcccgcctcggcctaccaaagtgctgggattacaggcatgagccactgcacccagccagcttctagatttttaacttgggtatctctgggaagaatgatgccatttcctaagaagggattgaccaaggaataaataggttgggaagtatgtaagataattattaacgttgagaagtctaaaataaacaagcggataaatgacaataaagtaaattccagaaatggatggctggacattgtcgactagcttaggctaggtcaggacggataaagccaggagtcatggccatatggatggcttttttttttttttttttgagacagagtctcgctctgtcacccaggctggagtgcagtggttcgatcttggctcactgcaacatctgcctcctgggtccaagcgattctcctgtctcagcctcccaagtagctgagattataggcgggtgccaccacacccagctcatttttgtattttttagtagagacagggtttcaccgtgttggccaggctggtcttgaactcctgatctcaggtgatccgccagcctcagcctcccaaagtgctgggattacaggtgtgagcccttgtgcccggcctatcgatggcatttaaagccacaggattgggtgagacgccaggagaaagaagggccccacgaatgaagccctgagactcttgggcatcttgaagtggagctgaggggaaaaccagcagagactgaaaagaagctggagagagaggaagaaacccagggagggtggcatcctggattcggagaaaccactgtttcaaggaggatgtggctgtctgtgttgaatgcagctgagagatcacatgaaatgagaacagagaaatgatggctgggtttggtaacgtgaaagtcctgctgaccttaaagagggtggtttcagtggcatagttagaacaggaaggcagtgtgcattgggttgagaagaaaatgagaaataaggaactggaggcagggacaacctttttttttttttttttttttttttttttttttttttttgtgacagagtttcactcttgtcacccaggctggatccagtgcaatggcacgatctcggctgaccgtaacctccacctcccgggttcaagcaattctcctgcctcagcctccccagtagctgagattacaggcatgcgccaccacgcctggctaattttgtatttttagtagagacagggtttctccatgttggtcaggctggtctcaaactcccgacctcaggtgttccacccgcttcggcctcccaaagtgctgggattacaagcatgagccactgcacccggcctaggacaaccctttttagaagtttctctgtaacaaggagcagagaaataggccagtaggtggaggggtgtgtggaccaaggaaaagtttagttctgtgaacaatactattttcatctgatctaacatgtactgagggctttcttgagataggcactgtgtctggcacttgtgtttggtcttatctaatcctcacaacagccctaaaaggaagatactctaattacctccattttacagatggaggttacacaacttgtctgaggccatgagatactaagtggtggagccaagatttgaacccagctagaatgtgcctgtgtactggacatggtctgcatgaaaggcgaggtggctggtgcaggggtgaggggtccatgcaggggccacatccaaaaaggggagagggaagtttccagaaagaagagaggacacatctcccaccattaccagagggtcaaaggagaacaagagaccaggtgggtttgtagatttgctggggggagatgagggaacctttgctcgatgacttctaggtcctctggacaactagggagatggagacaggagatttgaggagaaatggtacaaaatctcaacttgctgattatgaaagcaagcttcgtgggggaatgtaagattgccaggcaggacggaatgtccaggtgaggtttgtggctggagacaagtgatataccaggcaagccctccgtgctcctgggcacaccatgcccttaggctacaagcagcctttgcttaggctggcttcgtagctaggaatgccctctcttctctgccctccctactcttcatgcccagatcagccttcctcccctctgtatagaccacttattttggcaattatccagacattcattcattcattgactcaacaggcattgaagacctactgtttgctaggggccaggctaggtgcccacagcaactaatatccagactcttttttttttttttttttttttttgagatggagtctcactctgtcgcccaggctggagtgtagtggcgcgatctcggcttactgcaagctccgcctcctgggttcatgccattctcctgcctcagcctcccaagtagctgggactacaggcgcccgccaccacgcctggctaatttttttttattttttagtagagacggggtttcaccgtgttagccaggatggtctcgatctcctgacctcgtgatccacccaactcggcctcccaaagtgctgggattacaggcgtgagccaccgcgcccagccggtcagacccatttttttttttgagatggagttttgctcttgttgccccagctggagtgcagtggcgccatctcggctcactgcagccttctcgggttcaagtgattctcctgcctcagtctcccgagtagctgggactacaggcgcctgccaccacgcctggctaattttttttttatgttttagtagagacggggtttcaccgtgttagccaggagcgtctcgatctcctgacctcgtgatccacccaccttggcctcccaaggtgctgggattacaggcgtgagccactgtgcccagcctcagaccaactcttaaggagtcactgtctaggagaggaaacaagcatataaatttgtaattacaggaacatacaaaaaaaattagccaggtttggtggcacatgcctgtaatcccagctactcaggaggctgaagcatgagaatcacttgaacccgggaggcggaggctgcagtgagccgagattgtgccactgcactccagcctgggtgacaagagtgagactccatctcaaaaaaaaatttgtaattacagtggaatatgacaagaacaataataaaagtggccaagatacctggcaacacaggggaagacagacatggctgtggagtcagggattctctccctgcatcgcaaggtgccgctgggccttgaagcaggagcgtaagacaagacaggcaaggggtcaagaatggtgggtgcaagcagaagcagcccctggggcaaaagccccgggtttgcccagagcatgatgaggctgggggactctaagttcagcgtggcagaagcagaaagtgctagaggagcgagatggggatgaggctggagacagaagccaggccacacggtggcatgtgggaactattctgaggtgagccatcggaaggaggaaggcgaggcgaggcgggcttacgtctgcatcttagagactcattctgtggctttgtgtagggaataaactggaggaagccagaatggaaacagggaatgctgtgaaaaccagacagaggcaccagatgggggagagaggggagagagctatttaggaggcaggatagataggaactggtgatcgattaatgatgtaggtaaaggagagggaggcttgaatatccccctggtggcaaaaccagaagccaaatgtggaaaacagacagtaaagcaagagtgggatgaggggggtcagctcagtgttggttgagatgagtttgaggggctattgctgttcagatggtgcagttggcagggtaaggaagggaaggaaacttcagggctggagactctgcagagcacaggttgtgggaacccattggtggaaataaaaatgcccagtgagcgttttttttgtttttttttttttttggagacagagtctagctctgttgcccaggctggagtgcagtggcatgatcttggttcactgcaacctccccatcccaggttcaagtaattctcctgcctcagcctcccatgtagctaggattacaggtgcctgccaccatgccctgctagtttttgtatttttagtagagacggggtttcaccttgttggccaggctggtctcgaactcccgacctcaggtgatccgcccaccttggcctctcaaaatgccgggatgacaggcgtgagccactgcacctggctgagcatgatgttttcaaggcacatctgtgccatagtgtgtatcagtacttcactctttttatggccaaataatattccattatatggatagacattttgttgatggacaattgggtttcattttattatttttagttgtactaattcagataatgtatgtttacatcctccatataaaagaagcaaataatatagatatccatgaagtaaaacattaaatcccctcacgcttctccttcagttctactcttctccccagaagtgactgcaggtgacaatctgccctgaatgtctctggccatatacattagattttttcacataacttcctagtcaactatgggcatcataggggatgggtcctcccttgcccggggtgatctatgtgtcttctgggtaaagtgggcgccgaatgttcatatgctcaatggatccctggggagtgtgggggagtcctgtagagagacgtttccttatctctgagcatccgtgttcaggtgtggacgggacagtgagtggctgggaggaagccagaatcaacagctccagccctctgcgctacaaccgccagatcggggagtttatagtcacccgggctgggctctactacctgtactgtcaggtaagccccatctggctgcatgggtaacgcagtaagagagtggcgaagggtttgccaggagagtgggggacaagctacagggctgggagggtgagttggggtttgggtgggatgggatgcctgcgtcgctgaggaaattggaaattgaggcgagggcaggcagaggcctggactcggcctgttgtccccaccccaggtgcactttgatgaggggaaggctgtctacctgaagctggacttgctggtggatggtgtgctggccctgcgctgcctggaggaattctcagccactgcggcgagttccctcgggccccagctccgcctctgccaggtgtctgggctgttggccctgcggccagggtcctccctgcggatccgcaccctcccctgggcccatctcaaggctgcccccttcctcacctacttcggactcttccaggttcactgaggggccctggtctccccgcagtcgtcccaggctgccggctcccctcgacagctctctgggcacccggtcccctctgccccaccctcagccgctctttgctccagacctgcccctccctctagaggctgcctgggcctgttcacgtgttttccatcccacataaatacagtattcccactcttatcttacaactcccccaccgcccactctccacctcactagctccccaatccctgaccctttgaggcccccagtgatctcgactcccccctggccacagacccccagggcattgtgttcactgtactctgtgggcaaggatgggtccagaagaccccacttcaggcactaagaggggctggacctggcggcaggaagccaaagagactgggcctaggccaggagttcccaaatgtgaggggcgagaaacaagacaagctcctcccttgagaattccctgtggatttttaaaacagatattatttttattattattgtgacaaaatgttgataaatggatattaaatagaataagtcatagtctctctctttattggggctcaggggacactctcagggtagctgggggccacgtgaaggggggcgttgcggagcggcacagctggaactccgggatgatgttcaggcttgggggcggggacctccatgcctccagcccccaggtgggagcagaggtaggaaggcacactgcccaggaaaaaaatcaatcctccgcccaaggtacagcagaagcggcctccttggcctaggaggcagacttcctcctgcggggaaatcccttcctggctgggaggagcaggggcccttcctcttggtggcctcggacattcagcaggtgctggcacaggccctggctgggaggtggggcgggcaggagccagcctggaggaggggctgagagtcagcaggcacacgggaacccggaaccctgtgtgctggggaggaatcccgcagtggccggggggcttgaggccgctgctttgtctcttcgtccagagccttatgtaagagcttttctcgggaaacaggaagtcctgcttgccaatttcagcacagggagtagtgcaggccttattccaacacacccggcccagccttaaccccagaactcagccagtttcttgcttccgtgcccctggttctcctccccatcgagcccacccctcctttcccaccttcagtcacccctagtgaactgccccagcgatctctgctgtgcttgaccccgagggtcttccaccctcgccctgaccctggacactgcccagcttggccccccatcctgctcctggcacaatgccctctagccagccaaccttccctcccccaaccctggggccgccccagggttcctgcgcactgcctgttcctcctgggtgtcactggcagccctgtccttcctagagggactggaacctaattctcctgaggctgagggagggtggagggtctcaaggcaacgctggccccacgacggagtgccaggagcactaacagtacccttagcttgctttcctcctccctcctttttattttcaagttcctttttatttctccttgcgtaacaaccttcttcccttctgcaccactgcccgtacccttacccgccccgccacctccttgctaccccactcttgaaaccacagctgttggcagggtccccagctcatgccagcctcatctcctttcttgctagcccccaaagggcctccaggcaacatggggggcccagtcagagagccggcactctcagttgccctctggttgagttggggggcagctctgggggccgtggcttgtgccatggctctgctgacccaacaaacagagctgcagagcctcaggagagaggtgagccggctgcaggggacaggaggcccctcccagaatggggaagggtatccctggcagagtctcccggagcaggtgagtgaggggaggagggtgtctgggagaggatggttagcatggggggtctctgggcctcctggtctgcaaagtttcaagggggtgcaagagagggtctccggtttggaagtcaggggcgcggccattccaggaaaggaaactgttaaaggttaatgcttctcatacctaacaaatcctggagggcagccagcaccaacactcagggtgctgggaaaaggtgcgtgagagatctgaggcatctcgggggcaggggagggctgggaaggcaggctggctgggaccctcgcatcttaacctaaccttgaccctctttccatgagcagagttccgatgccctggaagcctgggagaatggggagagatcccggaaaaggagagcagtgctcacccaaaaacagaagagtgaggcttccagggtgcagcaggggtgggaggtgatcaagcagcgtggggattgtaagcccgagtcagggtgagggtggaggctgccaacagcacaacgggggaaagtggatgcggctgagattccctccttctctcctcagagcagcactctgtcctgcacctggttcccattaacgccacctccaagggtgagcactattttaaataatggctttggggaggggcaataaccaggaactcgggctggcacttgggctcaaggggtccttataggtgaaagggaaagaaccaaaaagcacctgagagtgccaagaagtcctgaccgacacactctcacctccagatgactccgatgtgacagaggtgatgtggcaaccagctcttaggcgtgggagaggcctacaggcccaaggatatggtgtccgaatccaggatgctggagtttatctgctgtatagccaggtaaccccagccacactctgagcttcacagagggcctctttggccccctactgagggttcctgacccctctattcataccaaacccagcagacccttctttcttccctcgttagcgctcctgaggcctcccagaactgagccaggccatcctgttttcttcaacatctcccttccctgccaggtcctgtttcaagacgtgactttcaccatgggtcaggtggtgtctcgagaaggccaaggaaggcaggagactctattccgatgtataagaagtatgccctcccacccggaccgggcctacaacagctgctatagcgcaggtgagagccgtgtgggcagccgaaagcaggacgtctctgaccgggggtagcagtgcagggagctaccgctaggagggaggttggaaacctaaacagaggcgggtctgaggagtgaagtgcagaatgccgggtccttacaggaggcagaggaacggtggagctggagaaggcagggggaaacagggcatctggatggctgtgcttcactgcgaatctactttctctcttttctcaggtgtcttccatttacaccaaggggatattctgagtgtcataattccccgggcaagggcgaaacttaacctctctccacatggaaccttcctggggtttgtgaaactgtgattgtgttataaaaagtggctcccagcttggaagaccagggtgggtacatactggagacagccaagagctgagtatataaaggagagggaatgtgcaggaacagaggcgtcttcctgggtttggctccccgttcctcacttttcccttttcattcccaccccctagactttgattttacggatatcttgcttctgttccccatggagctccgaattcttgcgtgtgtgtagatgaggggcgggggacgggcgccaggcattgtccagacctggtcggggcccactggaagcatccagaacagcaccaccatctagcggccgctcgagggaagcacccgccggttggccgaagtccacgaagccgccctctgctagggaaaacccctggttctccatgccacacctctctccaggtgccctctgcctcttcaccccacaagaagccttatcctacgtccttctctccatctatcggaccccagtttccatcactatctccagagatgtagctattatgcgcccgtctacagggggtgcccgacgatgacggtgccttcgcagtcaaattactcttcgggtcccaaggtttggctttcacgcgctccattgccccggcgtggcaggccattccaagcccttccgggctggaactggtgtcggaggagcctcgggtgtatcgtacgccctggtgttggtgttgcctcactcctctgagctcttctttctgatcaagccctgcttaaagttaaataaaatagaatgaatgataccccggctccatttcccccactgcctcgcctcagcccggtcctcgtacggggatctcccgccctcctggctctcctgtggcgcgccccccgccggatcaaggtactggggatgccgctagggtcaggcccgcgagcgcggagaagacagagcgcggcgcaaaagggaaagtggcggggccgccacgcgcggccgggcggcggatgtgcgcaggcgcagcctcgcgtagcgctctgggctggccagtcccgtggcgccggcgtcctcgggtagacgggaccgcgcgcttggtggccgcgccggcgctcttcgccgggtgtgacgtactaatcgtgcgccaccgctgccggtgggcccggggctcgcgggaggggaaggaggagggggggaggagtggcggcggcggcggtggcgctggtggcggcggtggcggaggtggaggtggaggtggaagctgaagctgaagcagagccagaggcggcgcggcggggtgctcggcggcgcggcacgcggcccagaagcgttggaatcctgaattgagacggctgcgcctaaagacagcaggagtggcggggccgccgccgtcgccggagagatgagccgggaagcttgaggccggagacgcccgccttcgggcccgtccgcccggcttccccgctcccggtgaggacgccccctcccctccccccagccctgccttggcctctcccattcctgggcctcgctcccaccgaaccggggcccagaggcccgcataggggcttcttaaggcccgtgtgcgccgagccatccaagctcgtgggaccggactggtgccgggttgcattctggtccccgaggatgaagtaggagggggctgggccggcctggcttgtgcgctccgttctgtcccagcgtcttgattcggttctctttaagtttccttcaaagttcttccccgtttatcagcctctgccccctgaaccatatccctggcatctgcacttgagatgaccgcagccttcccatgccccccgttcatccagggtgttagagaactgtctcccattccagtccagtttccacgtgcaagttgcattctcctcaagtaccacggttatcatgtccctgaggaaagaaactgcccttgttgggccctcaaaggacagccctggtggtattaaaataaagacgtagaacctggcagtgctattgggtttggcctggtgatcttagaaataagatctctgaggcctgctgcttagccattttcccttgtctctggactggggagagatgatggcacagaccctgaagggccccttgtggaccgcgttaaccgggaagatcttaagttaggagttttgcgttttttcctcttttctttatttgcatctgaatccagaggaggcatggccaggaagagaggcaggatctgcggtggggtgatgcttagattttgataccctgatcttttgtttttcagggtactggaagatgaaagagactatacaagggaccgggtcctgggggcctgagcctcctggacccggcatacccccagcttactcaagtcccaggcgggagcgtcttcgttggcccccacctcccaaaccccgactcaagtcaggtggagggtttgggccagatcctgggtcagggaccacagtgccagccagacgcctccctgtcccccgaccctcttttgatgcctcagcaagtgaagaggaggaagaagaggaggaggaggaggatgaagatgaagaggaggaagtggcagcttggaggctgcccccaagatggagtcagctgggaacctcccagcggccccgcccttcccgccccactcatcgaaaaacctgctcacagcgccgccgccgagccatgagagccttccggatgctgctctactcaaaaagcacctcgctgacattccactggaagctttgggggcgccaccggggccggcggcggggcctcgcacaccccaagaaccatctttcaccccagcaagggggtgcgacgccacaggtgccatccccctgttgtcgttttgactccccccgggggccacctccaccccggctgggtctgctaggtgctctcatggctgaggatggggtgagagggtctccaccagtgccctctgggccccccatggaggaagatggactcaggtggactccaaagtctcctctggaccctgactcgggtaaggtgggaaaggggtgtggggttgcgggggaggggttagggagggttaagagcctggagcaccaggagcctgttgccatggtgagagctgggcttaaggaaagtaggatggaagagtgccggctccagaagagctgcgaaatgtctccattaagccccactttgagcagaaagtaagcctgggagtgagcctggcagtttcccaggcagagctaggaaacagatgccctaagtaggtatcccgtggtcttgagcgcagatgagaaagggagatgtggtttacaaaaatcctgtccacacgaaatcccttgtcggcctctcagtataagaacccccgtgtatacatctccagagggtaccattcccaaagtgacgggatgggatctctcccagtagtggagtacatcatcttacagttgtgaaagaatatttccctttcggagaactccagccaaacagtttcaggctctctaggtctttattacatattctagtattcattgagcctttacaatatgctgggtactatgctgggtgtttggcatatagtggtgacaaatatcccgaagttttcatttctaaatgctaatcctttttctttcttcctgtctatgagtaggaactctctctccatccctgtagaatctcttggacatgtttatctcatgcttatggggtccccatttcttggagtgggattgacattggtggattctgcttcagtgtatccttcttgcggtcttatttgcatgcatgagtcaactgtgtgcatcccattgtgctttccccaggccagtctctcatgcccattccatttcccctgccctataggcctcctttcatgtactctgcccaacggttttgggggacaatctgggccagaaggggagcgcagcttggcaccccctgatgccagcatcctcatcagcaatgtgtgcagcatcggggaccatgtggcccaggagctttttcagggctcagatttgggcatggcagaagaggcagagaggcctggggagaaagccggccagcacagccccctgcgagaggagcatgtgacctgcgtacagagtaaggagcccttaagcaactagcctctctcccttctccgactcctagaggagagtctggaggcctcaccccctcctctctccctttccaccaggcatcttggacgaattccttcaaacgtatggcagcctcatacccctcagcactgatgaggtagtagagaagctggaggacattttccagcaggagttttccaccccttccaggtgaggcttgaaagccctccttgaaagaagggctggggccttggggatgtggagagaatactgctgccttttcttccatagggctgtagttggggaggaggaagctagagctgaaggggaggactctgcaggcaggtgccaaatccttggaagctgatgggagagtctttacctgggaccctgaaatgttctacctgagtagtcatgtttatctttctggggagtgggcctttcgcaggtcctcagaaggacccatcatgagccagaaaaaagggagtcagttagaatttgtattccagggagtagtaggtatttctgtgtgccccagctgcatcatcttttgtgtgactccacccttggcctactcaggaagggcctggtgttgcagctgatccagtcttaccagcggatgccaggcaatgccatggtgaggggcttccgagtggcttataagcggcacgtgctgaccatggatgacttggggaccttgtatggacagaactggctcaatgaccaggtgagaaagggtagagaaacaggcctgagaggggattcagggagcagggtgtctggggccctctgcatgggggagccctgtacccatgccgcaccctccatggcaagctgcctcccatcttctccccaggtgatgaacatgtatggagacctggtcatggacacagtccctgaaaaggtaggcccaaccagataggtcagtacccagaggaacttctgcagttttaagcagctttttaagctcctttcatctctttcattttacacagagagggtctctgtttcagggagagaggtggtagtggtagtgtattaatttcaaatccgtaatcttgggctctggatttatcagttgttttcctttctgccagtatttagtgtttttcgctatggccagccccaaggattgggatgggttcctattgtaactattgtaaaacaagatttaaaaaaaaaaagaaaaagaaaaaggccaccgggcatggtagctcatgcctgtaatcccagcactctgggagaccagggcgggtggatcacctgaggtcgggagttcaagaccagcctgaccaatatggagaaatcccgtctctactaaaaatacaaaattagccgggcatggtggtgcatgcctataatcccagttactcgggaggctgagggaggagaactgcttgaacccgtgaggcggaggttgcggtgagtcgagatccacgccattgcactcccgcctgggcaacaagagcggaattctgtctcaaaaaaaaaaaaaaagacaaaaaacaacttcggctgggtgcggtgactcattcctgtaatcccagcactttgggaggccaaggcgggtggatcacccgaggtcaggagttccagaccagcctggccaacatggtgaaaccctggctcaactaaaaatataaaaatacaaaaaagttagctgggcatagtggcgggtacctgtagtcccagctactcgggaggctgaggcgggagaatcgcttgaacccgggaggcggaggttgcagcgagtcgaaatcatgccactgcactccagcgtgggcgacagagcaaggccctgcctcaaataaaaaaaaaaaaaaagcctggtttgttgactcatacctataatctcaatgctctggaaggccgaggcaggcagacagacagattgaggccaggagtttgagaccaacctgggcaacatagtgagaccctgtctctaccaaaaaaaaaagaaaaaacccagaatttgtttttactgtcagtggactgaggaggggagacttagtgggagagtctgaggtcttttaattccattgagcttttttgtgtcattggcacaggtgcatttcttcaatagtttcttctatgataaactccgtaccaagggttatgatggggtgaaaaggtggaccaaaaacgtgagttttgaattcacatccacttgtgtaatgccttgcctctaaagaatgagagtcttgttttctctgagccctttccctgaccgtgttcattcagtctttcaaagattaaacgtctcttgtgtgtgtaggcactaaggatacagtgttaaataaggaaaacttgcccttaaagttaaattgcagctagtgataagtgctgtgggcagatcaacacagagtaacgtgaggctgggcgcagtggctcacgcctgtaatccccagcactttgggaggccaacacgggcggatcacctgaggtcaggagttcgagactagcctggccaacattgagaaaccccatctctattaaaaatacaaaaattagccctgtgtgatggcaggtggcctgtaagcccagctattcctggaggcggaggcaggagaatcccatgaacctgggaggcagaggttgcagtgagccgagaccccgccattgcactccagcctgggcaacaagagcaaaactccgtctcaaaaaaaaaaaaaaatcacagtaatgtcatagcgtgggaagtgggtactttagattgggtgatctaggaaggcctctcatagctgagacgtgaatgatgagcagccagccatgcgcagacctgggaatagcaagtacacaagacccatagtgaaaaaccatggctgaggaacagagggcttgtgggggtgacctgtgtagttggcgcagagtgagcaaagggagatggatacaaaattcggtcagagagtagatcatgtaagacatgtacggtaggctgaggaggggggattttattgcgtgtatactgagaagccattgagttttaagcaggctgagaagtgccttctgttttaaactcctgtttcaatgacagattgaaaggggggcaagaatggaagcaggaacagagcacagtagtccaggtgagaaacttgaactggagtgctaaaggaagagagagagagtagttttatgtaggataaattttacgagtaaaaccagtaggactgacaggctctgtgatactgagagatacatatttggtctcctgaccaggctcctggcattcaacttctaaaatccttggaatctccagtgatgtgtgtttttgtgtgctgatgagttgattcatggctagcccctctaggtggcttcatgattagagggttggaactttcagcctcacccccaccaacttcctgggaggggaatggggccaaaggttaaggcaatcactgaggatcagtgatttaatcagtcatgcctagtagtgaagcctctaaaaaccggaaaggggccgggtgcggcggctcacgcctgtactcccggcactttgggaggctgaggcagatggatcgcaaggtcaagagattgagaccagcctggccgacctggcgaaaccctgtctctactaaaaatatgaaaattagctgggcgtggtggcgtgcgcctgtagtccccgggaggctgaggcaggagaatcgcttgaacccgggaggcagaggttgcagtgagccgagattgtgccactgcactccaccctgggtgacagagtgaaactctgtctcaaaaaagaaaaaaaaacccgagaggaggagtttggagacattctagatagctgaaggcatggaggctcccacaggatggtctccaggcctcttcccggtacctttccctgtgcatcttttcatctgtactctttgtactaccctttgttaataaactggtaaatgtgtttccatgagttctgtgagctgctctagcaaattaatcaaattcaaggagggggtcatgggaacgctgatctaaccagttggtgagaaacacagataaaacaacctggggcttaggactggcatcagaattgggggcagccttgtgagactgagccctaaacctgtgacacattatctccaggtagatagtgttggaattgaattgggggatacccagctgtgtccaccgcaaaattgcttgcttggttgttggtggagagaaagccccacaaacacttcttggtgaccacaggttacagaagtattttgtgttgtgagagtatagtaggaaagaagatttgtttttttgccgggcgcggtggctcacgcctgtaatcccagccctttgggaggctgaggcgggcggatcaccaggtcaggagatcaagaccatcctggctaacacagtgaaaccctgtctctactaaaaatacaaaaaattagccgggcgaggtggcacgtgtctgtagtccaagctacttgggaggctgaggcaggagaatggcatgaacccaggaggtggagcttgcagtgaggcaagatcacgccactgcactccagtctgggcaacagagcaagactccgtctcaaaaaaaaaaaaaagatttgttttttcctccgcaggttggatgtgggaaatgaagaaaaagaaatggaggatgatgcctaggtttttggcctatgtaacgggaaaagtgggagaggaacaggttgggggaggaaaatgaagagttcttttctcttctggtttccctgccctcccattcaaaggccaggaaatttctacagctaggcaggatgattggctccggcattccttaatttcagtcctcaaaatcaagagcttacaccctcagggatcttcttgcagtagagggaagggtggtgacgtacagtgaaaaacatgttggccttcttcatactgagtttgagtcccacttctgccatttctttctttcatgaccttgtgcaagtcacgactttccaagctgcaatttcctcatctgttaggttgaatgttgagaacttcccggtaggattgttatgagcattaactgcgtgtttactttgtgctgtgtcttgttctaagtgtattatggatagtcactagtttaatcctcatatcaaatggatgaggtgtaggtactactatttacactctctgacagataaggaaactgaggtatagaaggttattaagtaggttgcccactgtcataagccagtaaatggaggagctgtatttgaattctggcaggctccagaatcctgggcctgggttcttagctgctaagtgcttctccctttaaagtgtgaaaagcgcctgcccatcatgggttctccagtgttcgttctgatgtctcctccattgtctgaccttcctcccttaccccgaagaaccgaaacatgcagatcctgagcttgcccacaatctaggccttgggtcttctgttctttcacttggttcccttacctgtgtctctgttcctctctagaaccttcatggcaaaaggcaagacttctgtttgttgtacctgacctgtggcactatctctttaggtggacatcttcaataaggagctactgctaatccccatccacctggaggtgcattggtccctcatctctgttgatgtgaggcgacgcaccatcacctattttgactcgcagcgtaccctaaaccgccgctgccctaaggtttgagggggtaggagagagatgggcaaaatgtggggcggtgcagtggcaaggcattgcaggaagaagggtgggctttgggtctttgaggggcgacctgggcatggtgtctgccagcactgtacccaccatactgtgttcaattgagaaacttagggcatcactttcttttcccccatccacatagcatattgccaagtatctacaggcagaggcggtaaagaaagaccgactggatttccaccagggctggaaaggttacttcaaaatggtgagtttcctgagggaggggtatagggtgttggtggggacagtggtagaaggcagaaattgaagtcctacccctgggagtctccatgtgaagggcctgctttctttctcttctctagaatgtggccaggcagaataatgacagtgactgtggtgcttttgtgttgcaggtaagcagatgatggggccacctcccctagctctgaagtcagttgggttaaagggtcgggaggctgttatgcatcccctcatttggctcatagtcagttgtggagcaggaagtaatctgttttagaacaccaaaacactggcttcactggttctcttctggacttctccatcccacattgggactgggtctctagtcttgggcctctggccttcatagagctccctgctaacctccaactcagtgtattttctccatctaaaacattctatcaagtaagaacactagctttagagtcaggctgtttttgaaccccaggctgtgggaccctggctccctttggggatgttctctgaaggatggagacacatctcatatgaaatgtgtagcacaggtcctgacacggggggtttctcatggcttgctttgttaacacccagtactgcaagcatctggccctgtctcagccattcagcttcacccagcaggacatgcccaaacttcgtcggcagatctacaaggagctgtgtcactgcaaactcactgtgtgagcctcgtaccccagaccccaagcccataaatgggaagggagacatgggagtcccttcccaagaaactccagttcctttcctctcttgcctcttcccactcacttccctttggtttttcatatttaaatgtttcaatttctgtatttttttttctttgagagaatacttgttgatttctgatgtgcagggggtggctacagaaaagcccctttcttcctctgtttgcaggggagtgtggccctgtggcctgggtggagcagtcatcctcccccttccccgtgcagggagcaggaaatcagtgctgggggtggtgggcggacaataggatcactgcctgccagatcttcaaacttttatatatatatatatatatatatatatatatatatatatatatatatatatatatatatatatatatatataaaaatatataaatgccacggtcctgctctggtcaataaaggatcctttgttgatacgtaagtggtggtcttccttaaggggcttcaaattagtggatatgcttagctcagaccttccagccagtctcttgagactaaagggttcagctttccatccctggctcaggcactgccaacaccttgtcttcacccaaacaaatccccgagatgggagcagagagcaggaaggagggaaagtagataagcctcaagaataagggcatccgagagggaagctggggaactggacacaagggactggggaggggaccaaccaggattcatgatagtaccccaaagccctttacagttttcttccatccctccaccatccagccaggggaatcctcccatccctacgatatcgctgttgattccttcatccctggcacacgtccaggcagtgtcgaatccatctctgctacaggggaaaacaaataacatttgagtccagtggagaccgggagcagaagtaaagggaagtgataacccccagagcccggaagcctctggaggctgagacctcgccccccttgcgtgatagggcctacggagccacatgaccaaggcactgtcgcctccgcacgtgtgagagtgcagggccccaagatggctgccaggcctcgaggcctgactcttctatgtcacttccgtaccggcgagaaaggcgggccctccagccaatgaggctgcggggcgggccttcaccttgataggcactcgagttatccaatggtgcctgcgggccggagcgactaggaactaacgtcatgccgagttgctgagcgccggcaggcggggccggggcggccaaaccaatgcgatggccggggcggagtcgggcgctctataagttgtcgataggcgggcactccgccctagtttctaaggatcatgtctgcgagccaggattcccggtaagaaaggcatttgcaagagattgtggctgcttattttgccgcccccttccgacgggcccgccgggggtagctgagaggcccaccagggttgcgggagaaaccgaaccgggtggggggagggtccgacttggaggggcgagggggaagacccacggccgacgcggccaccaggtcgaggcggagggtagggacagcccggctagggtcaggcgtgcgaggtctgttacgaggcctcgacccgaggcggtgccatgcgcgaagccccggcgctgagtggcgagacggggtcgcgacctggcgtgggaaagaaaggtggaggcggccgccactatgtgtggcccagagccggcaggtccggttgcctccctgtgccgggggagggacggcgcgcggggttccggagcattctgacggtaccactcgcgagaggcgggggtgcctggtccttagatccagtcacttcgtcgcggctaaaacacgggtcggggagaagaaaccggccgttcagtgtgctggttttcttgacggccaggactgagcctaaccccgaggagcggccgcgtgaggcaccaggagcccacccggcgccgggcgggcgggtccattttgccgcacaagccgggctattggcaaactgcggatgggcaggtccaccttccttcgggggtgagcggcctgaggtatgggagggcgacgctacttcgcgacgggggcgggcgggatgtggattgttcatggaggggtgggagacgccgccgggtggtcgagggagcgagcacatggtggcctgaggcgttcccctcccccagtctgcttcgcttctaagtgttgtgcaatctccccctttgctagctcggcttgggctcattgtgcgcgaggccgccaccgcccgcggcctcccacatccgggcaacgcgaggggggggcttcggctggagggagtgggggagggcgcgggcgggatgacgtggggggaaggggatgtcctaccctccgatctgggaggtgaagggcgggacttccagcgcgctggtgctgcggtgggaggtgcacgcgcttgggctttaagcggctgggtcgggcccacgtggacccggcggcaagcaccacctctgggcaccgtgagcgcggcggcacgcctgccggcctgtcttcagaaagggtcacccccttatgtcgggggtggcctggcctgagccgctgcctgcatggggcaaatgcctcagttttatagaaactcctcctttgggtattttttgggagctggtgggagttggatctgggacagcagattgatggcatcatgcaggccactcctgacagagcccggctgtcaggatttctgagtgcttcggtcgggcaggggacaaaacttatgctttaaaccaacagatccagagacaatggccccgatgggatggagcccgaaggcgtcatcgaggtgagactggagaaatggaattctgtcctcccccattacaactttcagccgtatagagttagagtggcctcttgattgatttcccagatcatctagaagcagctggtttccctaaagggaggagggttgtaagctctgaggcttttgttagtaggcaccagattctgtttgctcggagactacagctcagctccaccttttccatgactcaagctttaatttctttgcatcccctagagtaactggaatgagattgttgacagctttgatgacatgaacctctcggagtcccttctccgtggcatctacgcgtatggttttgagaagccctctgccatccagcagcgagccattctaccttgtatcaagggtgagacctctcagtcccagaagacattgtggactgtccctgacctgggtagagtggcatctggttggtgatgcccatctcatatcagccagggacaaagcaactccttgttcatcccagcttggcttttgatccgtgcccatgcctggttcatgccttggacacataggtttcctttaaagaggtggtattgtagccagcttatatttgcatctacagccatgtttctagtccagcttggtgtgcaatactagatgagttaataactggtccttgtttctgatctggttcccattgtgtaactgtgttgattgggaaggtagtttgtgagccatgaaatgcttggttcattggttgcttattgacctcattaacctaggacttgaatatcccaaagggtatgctctttaccacattcaactcctaatttatttgtttaggttatgatgtgattgctcaagcccaatctgggactgggaaaacggccacatttgccatatcgattctgcagcagattgaattagatctaaaagccacccaggccttggtcctagcacccactcgagaattggctcagcaggtaagagtggcttctattccctccttcagggctgatttagggatgatgagtataatccaaggaccagagaagtcttctctgatcaccaccttgggaggaagacatgggtgccctaacactctcgagacctgctgggttaattaaaagctatttcttacccaaacgtaaccattgcttcctccacccatttcctgagtcaaatgggaaagctgttgggtgaagcctggctggctgggcaagtttgactgtgttctgaataagcaccttcactatgggctaagagatcccttggtgtgggggtgatcttacagtagtcagagcagatggacagtccttttcacccttgcttaatagccagagctgtttcatgcctggggcacacacaattctaatgctggactttttcctgggtcatgctgcaacactgatgtcagagcatgtttttaaatgttctgtggcaggggcagtgattattctgggtgtggataatgtaagaagttacagcagagctccattctaaggcacttggctctcagttttctcagagtgaacatgcctcgtagcttgggtcctatggcaggagtgcaataggacatggatatgcatcacctgttctataaaactggttgctggctgggtgtggtggctcaactcgtataatcccaacactttgggaggccaaggcaggcagatctcttgagatcaggagttggagaccagcctggccaacatagtgaaaccccgcttctactaaaaatacaaaaattagccaggcatggtggcgtgtgccttttatcccagctactcgggaagctcaggcaggagaatttaacccaggaggtggaggttgcagtgagctgagattgtgccattgcactccagcctgggcaacgagcaaagctctgtctcaaaaaaagaaaaaaaaaatggttgctgcgtgatgaggcagttggtcaaattagttttcagaaggttaagggttctaaatatctagagtaaagaaactgaattaattatctgagcggcctcattgtgaatcactgtacactcaggaaccagactgagttgaaatcctgtctttgccacctattgacagcacgatcttaagtggattttagcctctgcctgtttctcagctgaatgtgagtttaataatagtgcatgccccaaagttgttggttaggaatcaatacatgaaaaacatttaagaatggtgccgggcacagtggtaactgacatatgagcacctgcctctctctgctcagatacagaaggtggtcatggcactaggagactacatgggcgcctcctgtcacgcctgtatcgggggcaccaacgtgcgtgctgaggtgcagaaactgcagatggaagctccccacatcatcgtgggtacccctggccgtgtgtttgatatgcttaaccggagatacctgtgtgagtaattcggttctccaatcccctgggtcactttgctcttgtgcacgctttccagtctttcagcgtaagccagagtcattcccaaggatgctggtttctctctgggggaagagctgctctgtgatggagcccatgcgtgtcatctgagcctctggcttccctgccagtgcagccctggcagtgtcctacttcccagggctgttgtctgcctggcgggaaggtcctgggcaaaggatcagtctttgtactctgagagcagactacttggctcctctctgttttttatcagcgaagttggatatatctctcccacatttccctaatcatatgctatatattggctttttttttcttctctagcccccaaatacatcaagatgtttgtactggatgaagctgacgaaatgttaagccgtggattcaaggaccagatctatgacatattccaaaagctcaacagcaacacccaggtgagggcagtcttgcttgaatagctaatgattcttgaaaaatagtaagtgccaggggaaccatatactggattcttgagcctttttatgcatctgcttcagttttaggtgtggctagggaagggagcaggcctcaggaaggaaccagcactctaagactggcctttttttccactaggtagttttgctgtcagccacaatgccttctgatgtgcttgaggtgaccaagaagttcatgagggaccccattcggattcttgtcaagaaggaagagttgaccctggagggtatccgccagttctacatcaacgtggaacgagaggtggggcccagtgcaggaggcgggcctggtagtgagttgttgggtatagcccctgactgatttttgtcccccaacctccaggagtggaagctggacacactatgtgacttgtatgaaaccctgaccatcacccaggcagtcatcttcatcaacacccggaggaaggtggactggctcaccgagaagatgcatgctcgagatttcactgtatccgccatggtgtgtttgcccgctgccagcctgttgtgggtctgcccgtcagaagtgtcctacttgaagccagggttcctggaacccaggtgcctacctggtctgctgcatatttgttttctcttccagcatggagatatggaccaaaaggaacgagacgtgattatgagggagtttcgttctggctctagcagagttttgattaccactgacctgctggtgagtagagggaactgatagcaaaggcagaagggaggatccaaggtgattccctctccaaggggacatcagtgcctctcaggaaagtagcagcttggaatagaatctggcatgcctaaggcctttggggaactgggatgcttatttcctctgccttccttggctgcccacatggatgcctaagtgtcttccctccgggatagagtgtcctccgtgcacatgctgaagagttgtctttcttgacgtaggccagaggcattgatgtgcagcaggtttctttagtcatcaactatgaccttcccaccaacagggaaaactatatccacaggtaagcgtagatctggaacactcccctaccccttcacacctggccctccctgggcttaaagctcctgatattcctcatccccttccttgttttccagaatcggtcgaggtggacggtttggccgtaaaggtgtggctattaacatggtgacagaagaagacaagaggactcttcgagacattgagaccttctacaacacctccattgaggaaatgcccctcaatgttgctgacctcatctgaggggctgtcctgccacccagccccagccagggctcaatctctgggggctgaggagcagcaggaggggggagggaagggagccaagggatggacatcttgtcattttttttctttgaataaatgtcactttttgaggcaaaagaaggaaccgtgaacattttagacacccttttctttggggtaggctcttgccccaggcgccggctcttctcccaaaaaaaaaaaaaaaacactaatccatttccctaacctagtaacctccagatcccagaggctctcctcacctcagctgagctcctttgaaagtgattcaagggactatgtcactcagcctcatttgctggaccaaatctggagggagaacccctaaaacccctaagtgaggttgcccagggggttgtccccaggtggggggaagcaggggagagaaaatggtagccatttttacattgttttgtatagtatttattgattcaggaaacaaacacaaaattctgaataaaatgacttggaaactgcctgtttgggcttctcatttcttacctccccttccctctcccacctgctactgggtgcatctctgctccccccttccccagcagatggttacctttgggctgttgctttcttgtcaccatctgagttctcagacgctggaaagccatgttctcggctctgtgaatgacaatgctgactggagtgctgcccctctgtaaagggctgggtgtggatggtcacaagcccctcacatgcctcagccaagaggaagtagtacaggggtcagcccagaggtccaggggaaaggagtggaaaccgatttccccaccaagggaggggcctgtacctcagctgttcccatagctacttgccacaactgccaagcaagtttcgctgagtttgacacatggatccctgtggatcaactgccctaggactccgtttgcacccatgtgacactgttgactttgccctgatgaagcagggccaacagtcccctaacttaattacaaaaactaatgactaagagagaggtggctagagctgaggcccctgagtcaggctgtgggtgggatcatctccagtacaggaagtgagactttcatttcctcctttccaagagagggctgagggagcagggttgagcaactggtgcagacagcctagctggactttgggtgaggcggttcagccatgaggctggctgtgcttttctcgggggccctgctggggctactggcaggtaaggaggaaggaggctgaggggagggggcccctgggagggagcctgccctgggttgctaaccatctcctctctgccaaaagcccaggggacagggaatgactgtcctcacaaaaaatcagctactttgctgccatccttcacggtgacacccacggttacagagagcactggaacaaccagccacaggactaccaagagccacaaaaccaccactcacaggacaaccaccacaggcaccaccagccacggacccacgactgccactcacaaccccaccaccaccagccatggaaacgtcacagttcatccaacaagcaatagcactgccaccagccagggaccctcaactgccactcacagtcctgccaccactagtcatggaaatgccacggttcatccaacaagcaacagcactgccaccagcccaggattcaccagttctgcccacccagaaccacctccaccctctccgagtcctagcccaacctccaaggagaccattggagactacacgtggaccaatggttcccagccctgtgtccacctccaagcccagattcagattcgagtcatgtacacaacccagggtggaggagaggtaaagctaaaactgggggatgagaggggagggaggcaggactggatataggctcagagggaagaaggaagaggggacagggaaccttggccggcatcgcatgcagtcttgtgaccttccagtctttaacttccgcaggcctggggcatctctgtactgaaccccaacaaaaccaaggtccagggaagctgtgagggtgcccatccccacctgcttctctcattcccctatggacacctcagctttggattcatgcaggtatagccatgacctcagtctcacccctcactcagcctcccggcgcccctcccctcccaatcccacacgctactccttcctctgtggagagggataccacctgcgccttcctcttcgccccacaggacctccagcagaaggttgtctacctgagctacatggcggtggagtacaatgtgtccttcccccacgcagcacgtaagtaacctccttccctttctcattgctaccactagacgccagggttcctgaaaggactaagctggggccagggaggtggataggatctgacccttcctcactcctccagagtggacattctcggctcagaatgcatcccttcgagatctccaagcacccctggggcagagcttcagttgcagcaactcgagcatcattctttcaccagctgtccacctcgacctgctctccctgaggctccaggctgctcagctgccccacacaggggtctttgggcaaagtaagacctacctactccttccctcctagaatcctcccactgcactgaaaaccccttccccaggcccataagccactcatctctcttcttaaccccccaaatctcgctctcccagcttgtcatggctacagggcagctttctttccatcctctacaagactctgccagtttcccccttttatcactgctgagtcactgcggtgagctcctcaccaatctcctactccccagcatccccccattccctcctcccacctttatcccaaccagcacgtcactgcaaatacctacctgccctatccttccgccaggtttctcctgccccagtgaccggtccatcttgctgcctctcatcatcggcctgatccttcttggcctcctcgccctggtgcttattgctttctgcatcatccggagacgcccatccgcctaccaggccctctgagcatttgcttcaaaccccagggcactgagggggttggggtgtggtgggggggtacccttatttcctcgacacgcaactggctcaaagacaatgttattttccttccctttcttgaagaacaaaaagaaagccgggcatgacggctcatgcctgtaatcccagcactttgggaggctgaggcaggtggatcactggaggtcaggagtttgagaccagcctggccaacatggtgaaaccctgtctctactaaaaatacaattagccaggtgtggcggcgtaatcccagctggcctgtaatcccagctacttgggaggctgaggcagaactgcttgaacccaggaggtggaggttgcagtgagccgtcatcgcgccactaagccaagatcgcgccactgcactccagcctgggcgacagagccagactgtctcaaataaataaatatgagataatgcagtcgggagaagggagggagagaattttattaaatgtgacgaactgccccccccccccccccagcaggagagcagcaaaatttatgcaaatctttgacggggttttccttgtcctgccaggattaaaagccatgagtttcttgtcacatgcctttctatgccttccatggctgggtctcagggagccggaagcagctgctgaggagggatgaaaatgtcagtgtgtgacgatgcctcatgggttcaccccccaaagcctggcacagctggtgttgggtctgccgtgcctcccttccttcctcctcttggggccactggctgctccagttccccatccgtggcaagccggtagagccattcatccccgcagccttcttcctgaccctcgtacagtttcaaatgcagcagacagccaaagcaatgagtggggggctgtggaacttcattcccaaaggcagcgccagtggctcctgagcaatgagaatgtcctgtcctgtccaccatattcaaggccagcagaagagcccgattaaaccctcgcagcacctggcatgctcctatcccacctacaaggggttgaatcaagaaggagcagtgggtactctgacctccactgggggctcctgggaacagcatgccccccacacggggccacctgccaagcctaacttcatgcccccagtacttgagatgaggagtgtcactctcaggacagccaaggtccagattccagaaaggacctcccagatggccacagcctgcaccagcagtgagcgccagtcccacccattacagctggctacggcgcaatccctgggagccaggatgagcagcaccccccagccgtaggagccccaggaggcttccggcctccaaggcccagagactgccccacaagggcagccctcacctggcagggccccagcagccccacctctgcctgcagacatccgtgtgaccttgtagactttggaggggggccgccaaagggctgatccacagcggaatgacgcacgggtgggcaccgtgggttggcgtcccggcggtcggtaacgaagcacaacgcccccaccaggtagtccaaggtgccctttcccaagcagcgctgcagggtccactcggcctcgccgaagtctctgcccagcacgtggtgcgccctcgggccagcggggagggggcgaatcccgggactgcctcgccaggcctcggctccccggagactcttgggggtctgggccccaagggtgattcaggtgctgcccttccccgacctgggctcgcctcccccacctcctcctctgcttcactgtcccgggcccagcagttgccggcgcactcatgctccgaggcctgagccaaccggaggcgagacaagcacagggccctgcgcgcaacccggcacctaaggaggcctgcccggtgcagactctcctgctcccaccggcgcccttccctctagagacgctgagagaacgggagctagtagcgcccccacccaacgccacctcggagactccggctccttctctctcaacttcgaacaatacaaagtgtgctaggagaagacaagatggcgcccagcaggaggagcggagaaaggcaggggtgtaaatctggcttccaaactggaagcgtcaacaaaggcgtgggaggtctaaccgcgcaggcgtgcagcttcggcaagctttacaattccaacagcgcgtccaaaacgtggtccctgactgagacttattttacgccactagagtgagggtgggtagcgtcagaaagagcggggcacggggcgggccagcttcgccgcgggaaaagaacgggaggcggagtgtccgcagcgcgcacgcgcaacgaaagtcaatggcggtctggagagactggcggaagctagctttgcaatatggcggccgaggcggacggaccgcttaaacggctgctcgtgccgattcttttacctgagaaatgctacgaccaacttttcgttcagtgggacttgcttcacggtgagttttattcagcatccgatccaagtcctactcgagtgaccgtgggcccttagtccaagccttgatcggcgactaagtgacggcagtgactgccgccatgccgagctggacggaagtcacttctgagaagggcggaagtgtctcgggctccttagagggaggacaccatattagtgccagtggggaagtcaccgggtggaattacttctttgtggagtttgtgctgtagcgacaatgaaaaacgaagagtcaacttttataaaacaaaataaaaattaagtcaaatcatgccaacctttattagatcgctagcagggttaaacttaattcaaagcccctgatgaatcgggccttcattgcacccccaaaggctccgccaccctgattgctttctttccagcctccaggtttgctcatagtctgatttcggaataatttgcctcccttcctttttctgattgcgagacagctccacaagggtcaccgtcagaccgtttggggagcgtcagtctgcccctgtcagttcatggtacctctcttgagctcgtggggcactttgttttagccgcattcatgacccgtgagagtcagactcccactagaccaagttccttgaggggaaggcttcaaggctagagaagttgtggatggccagggcataaaagcaagccttgaaagggtaaggtttagtccctgagtaggggccagggacagtcagagtgttcaagaaagagtggtatggggcgggcacggtggctcacgcctgtaatcccagcactttgggaggccgaagcgggtggatcacctgaggtcaggcgttcgagaccagcctggccaatagggcgaaaccccgcctctactaaaaatacaaaaaattagccgggcgttgtggcaggcgcctgtaatcccagctactcgggaggctgaggcaggagaatcgcttaaacccgggagacagaggttacagtgagccaagatcgtgccattgcactccagcctgggcaacaagagtgaaactccgtctcaaaattaaaataagaaaaaaaaaatggtatgaagacttgtctttggagagagaagacatgtgaaatggggcacccattggcccagagaagggaaataaaggatcagagagctcttgggcatttctcagctttatatggggaagcaatggagagccgtggaggtcaagccaagtttgggtgttaatttatagggaatggaagattggatgtggggggtggtaggcatcggagaaaagctgttttggaaagtaacagtctggggcccggtgcggtagctcgagcttataatcccagcactttaaggaggctgaggcaggtggatcatctgaggtcaggagttcgagaccagcctggccaacatggtgaaaccctgtctctactaaaaacacaaaaattaaccgggcatggtggtgtgtgcctgtaattctagctacttgggaggctgagacaagagaattgcttgaacccaagaggcagaggctgcagtgggctgagattgggccactgcactccagcctgggtgacagagcaagactctgtctccaaaaaaaaaaaaaagtgtggtggtttggagcaggaaggaccaggactttctcactgccctccgcctctcctccccccaagacaatgcaagaccctggtgtgggtaagggggctcggggagagcccacaggagcttcaagccctggcctgggtttcagacatctcctgtctgcttacccttttttctctcctcagtcccctgcctcaagattctcctcagcaaaggcctggggctgggcattgtggctggctcacttctaggtatgtctcttatctttctttccagctgttgggttggggtggaggtgctgagaggccatcaactgtgtgggtgttcgttctatagctgttgtgttgcatcccaaagaatggagagtcctcagtcctacttttctcatctttcccctagtaaagctgccccaggtgtttaaaatcctgggagccaagagtgctgaagggttgagtctccagtctgtaatgctggagctagtggcattgactgggaccatggtctacagcatcactaacaacttcccattcaggtgaggggcccacccttccaccccaagggtaatacccacaactctaatggggattaaggtgaaggaggttacaaggcagcaaagtggccgggcccagtggcttgcacctgtaaccccagcactttgggaggccgaggcgggtggatcacctgaggtcaggagttcgaactggccaacatggtgaaaccccgtctctactaaaaatacaaaattagctgggtgtggtgatgggcacctgtaatcccagctacttgggaggctgaggcaggagaatcacttgaacctgggaggcagaggttgcagtgagccaagattgcgccactgcactccagcctgggcaacaagagcgaaactcagtcttaaaaaaaaaaaaaagggacaaggggctaggaaagttttaagcccttttagaaacctaatcatcaccagtggaggtgatcttgagaaggggtgagcatcccgagaatggccacgattcagaatgagccagtcccgtgtgggggctgtagagaagcgtgatcagagcatagtgtccctggatggatgggctatggaggctttccctgcctctttctaggcccgcctttcttcctcccaactcttgactctgcagctcttggggtgaagccttattcctgatgctccagacgatcaccatctgcttcctggtcatgcactacagaggacagactgtgaaaggtgctggggacttacccaagagcaggctgtgtggttcctgggaaccctgctgggaactcaggtctgggaaagccaaatgatgtggagagattgacaaggactcctgtctccccacccctaggtgtcgctttcctcgcttgctacggcctggtcctgctggtgcttctctcacctctgacgcccttgactgtagtcaccctgctccaggcctccaatgtgcctgctgtggtggtggggagggtgggtaccaggagcaagggacaagatgttgtgggggcagggtgggggggaagagtagaagatcaaagtgtgggggtgttgtacttgggggagcatgggaagagctcaggtgacagagccaaaggtctcaactcctcccctagcttctccaggcagccaccaactaccacaacgggcacacaggccagctctcagccatcacagtcttcctgctgtttgggggctccctggcccgaatcttcacttccattcaggtgagtgcaacatcttccttctagaaggcactaaaacctcgtcttacttctcccagctaagggccaaagctgccccgtgaggaacctttgtccataagggaacctttcttgagctatgctgaagggtaaccctggctctgtctcttgcaaccaggaaaccggagatcccctgatggctgggacctttgtggtctcctctctctgcaacggcctcatcgccgcccagctgctcttctactggaatgcaaagcctccccacaagcagaaaaaggcgcagtagagccagctactggagtcattccgtttccactcattcacccaacctcagggttctccccatctgagccagcctgctggtgtgacttactcatcctccattcctctgcacttgcagactttctgagccagggttttcttttagtggaaacaaatggttgatggatccagatccttagaaaaggagaggatgggggtagagtctcccaagccaaaattttgacatttgagtgctttcgtaagccctgtacatgtactattaattcagtcattcagccaagcctcctcctctagcagcaatttccagctgtgtaacactatcctgggcaaatgttttaccctgtcctccagcctccctgcttcccttctggccctggaagactgagtctggacggcagagtggagggactgggaggctgtggctgcctccctccctcagcccggctgggactgtctcccggaccccagtgctggggtgggggaagggggacggagaatgactcaggcagggccccagggtggggtgaggaggttcctgctctggcaggtctaggcggaagggagtggagatggggctggttcctgctgcagtgaggggaacagatgggacaataaagactggagactcagttgaataatacaaaactgtttaatactaccaaaaatataattgtatgttgtgcggctctccctggctatcatgggaggactgcaggctgcctctgaactgtagtccaacaggagaaagggttgacagcctggggtaggggatgctgctggattaaaaaaggaggatgaggcccgtcccgtgaggtctgcgtccatgagggttagaggtgggttaggggcatgggggcaccagcaaggggagggttgtatggagtgggagagccagggggcaggtagtgggtataggtgggcagcagttccccctggagcctagggtcactctgagggagggagcacggtgagggggcttccagtttgcagtgggaagagctgcagagagaaacaagaggttagagggcacttccctgggttggaggtgagtctggccagttctgggcagacagggtagagcgtgccacccacccagccctggctacccagcccgctgggcgcagcaggcatggaagccgaccccgggatggagagcccgcggccctgttggggcacgctcgggagcgggcttgcgtgctgcacggctgttttcctcttggggagtcaggccaggaaagggcagaatgagctcggcctctccttgccctgggggctgggagaggaagctgggtcacacacaggccagaagcaggggggaaacggggcatctaactaggacacagtcgcatccaggggtcagtcacctgaccctacagggcccaccaccttcagactgagatggaaacgccctctgggagaaccctgatccgccccaccctacacaggccccggaggtactgggcctgcgcccgccacaccttggccgcgagtggcctctgcttgggtgggctcccgtcctccggcatccgcccccaccaaggctccagaagaggggcgcatgggcctccgtcttcggcccgcttcccaggcactcacccatagctgccaggcaggtaggctgtcgagtagctggggggtctgtacccaaagcctctgctcggttgggtggtcgcgtaccccggcccccagagcgggccgccgctggccaggttgcctcttccctgtccgcagcgggaaggtccggcgcccgagctcttggccttgcgccgaggccggtacttgtagtcggggtagtcgcgcaggtgtcgggcgcggagccgcttggcctcctccacgaagggccgcttctcgtcctcgtccagcagcttccactgcgcgcccaggcgcttggagatctcggagttgtgcatcttggggttctgctgcgccatctggcggcgctgagcggagctccacaccatgaacgcgttcatcggccgcttcaccttctccaggggcagcgtcccgggggccgcggggctcccagcgccctcccgctcctggggtcccgaagatgaggaggcagcagccgtggcagccggaggctccaggctccaggcctggtcctgtgaggagcctggtagcgccatgggttgggagaagccttaagagggcgtcctgaatgccctcccctcaacgtgaagcgtcgatcctgaaaatggaaaggtcttcccagtctggagtcgttgccgaggaacttgggtccttaaaaagtgtattttatccccaagcccagagcttaaaccggagcctttgcttccaacctgttcggcacactttggggagagtcgaatgcaaaatccgctgtctggtgccccggcactgaagaggtgttctgaggcctactgactgggggacccccggtccctctccccgacccgcagctgcgatcagaccgaccttccgtggagggggtaaaccataaacccctttgtggtctccggagttccgacagctgccaggcgcggataggccagacctctcccacctgggctcagcgtttgtggcaggcgggccagacctgggaacagcttttaaagactgactccgcccctgtccctcccataagactgcacctccttaagggcgccaacatcctcagcccgtaggtaaacccaggtgtcctgtttgtcccagcccccaacaccctcagggtgccacgccccccgccccccccacccaagacctgatgtcaggccttccagcccgttgctgattgcctcccctccctgaagcacaggcaatttaaagccaattctttccacaatgggatcaaacacagggggatgaagtgccctcagggcccgagttgtgctgagaggagcttgggagcatcccggaccaccaccccaacccctttcctggtgcctgttgctcctcaaatcccagaactgcccctggggcaagaaaggccgaggagggagaccatttttgtttcctgagtcattccagcaggtgcttgggccgtgattcaacccctttcccaagtgagaaaacttaagccctcccaactccagtccctaaacctatatttctccactgctattgaattatggcaagttttagcttcagtcgtccaagtcatgaggggggagccaggaaacccaggacaactccccaagttaagaggtctgtgatgcgcatgccggagaaaaagcctggagccagaacagaacaccaccaagaaggccggaccccgggctccagaggctgctgtgagggaaccctgctccccactctgcccaacggcccagcccaagccccaggcctcaggtaatcggattaagcagcctgccttggctctcagcttctacaggaacagctccagctctgagcagccctgcctagcctgtgctgtgactcagggtataggagtggcccaactccctctaccagcaaacttgggggaggggagaagcaacaaggcacaagcccccctcctctgaaccaggagggagaacctgggcctggggagtttaggaatgtcaggaattcccagaagtaagaccatctttgggacaagagacaatgaagagaagtcagatgtggaggaacagaaaacaagagccaggggccagggcaggtcagtcctagagaaacaaatggaccaaactggggacaaagaaggcacaggagccagacagccatttggatttttttattctctttttaaatactgtacagtgaaaaataaatacgccttctcatccaccagacaaggttggtcccctccccagggggaccttgtcaccccccttcatacacacccctggttctactccaaaaccttccccgtgcctcccacccacttatctcttactatccccgtcttccacagtgatgaggccccagaaatggggggtacaggatgggaggagggatagcaggggaggccccctgaacggtcaaatctgggtgggtcgaggagcaccccccaccaacaggtggagaatgggggtgttcagagagagattggggcattagaggataaaggcacatccagtctgatggggaaggagagaggctccccttaccctgggggtagggtggacaagagggagggggtatgaccctgttacacacccctccactagctcctggaggttggggggtacccaagctgctgtgccacccccctcccccctagataagagcagctccagcgcaggtcagttgggcctgtgagggccatggtgttgggcagcaagcgagatggagaagggaggggtgcaggttggaggttttatgaaaccccattcaccatactacccaactccaagggggcggagagctccccattctccgaggggcccttaggaagcttgctgacagagtcaccctgaggggaaagtgggaaagaaaacagaaaagcaagaagcggtgagtagaaattcaggtgggagacattccctaccatccaagccctcctggcatttggtgatccagaggttggttccctgatctcatgatccagtctctcttacttgggatccagaaaatgtgaaccacactttcttctctatcctattcaaagtttacactggtctaaactccatcagacacagctgcctctgcaattcagtaggagatttgtgaaattttttgtgccccctgccccagagtaacaacaaaaaagggatggggtaaagcacatcttgcctgcctaccttctgtcctgaaagagagtcttctgagggtttagtgcgttccaggggtggcctctggcggctctgagactctgctcgtgagatatagtcagccacagtcactggggaaggcaggagattaagactttcagatggaattctggtagccagcctaagacacccactgaacccgaacccctgattttcacaggggtgagcatcccattctctcagctctgaggaaggattctggtgtccagagttggctgacctggctggcggtctccactgatagagccatcagtccgattaccacggttacggcggcggcggctgcgattacgacgttgaggtcttgattcatcttctgtagggtaggaaaaaaccagagtcacacatccaacctcccaccctcgattcctacccatctctaactttccagaccccaggcacaccctcacccaggccattctctgtcatgttgggcccatctgattccaggcctccatccatgacggtcctgtcttcatcagtgcggcggcggcgggagcggcggcgcctggcacttgctggggggggttccccaggttctgaatcaaccgggggctctggttcagacgtgtccaataggctgtagggattactgtctggatccttcagcactggtcagaggaagaagaggaggagttggcagtcaggtgcccatcatctttccttttggcccatattcatgaacccagctgtctggtacctgagctaatagatgaagaattgtatctcgaagtgggccggggggcaggtgggggtcccctaccccggcccccagtcggccgcctccggctttcttcccctcgggttgggggatccctgtcgccaggcccagctcggttgggctcctctctcttctctgactcagtctctgaagctgtagacacatctgagctggggcctgaagaacacaatgggatttattcacggccattcatcccacctcaggatccatcacatcccccaaactggaagaattctccttctcactcacaagcctcccagccaatcaatcactttttcatcatctccattccagatttccccaaacttccatccagacctctgcctctacccacaagccctgccactccttgcctcctgttcccataactgtctcaccataggcaggaccgcctgtcctccggccacggccacggcccccatagctgcccccataggttcgagtcgcatggagggaggaggaggagctctcatcagtgctatatccagccttgtcgctgccaccgctgccccgcccactcccaggagggcgaaagcccagcccaatctgccgaagctgctcatcaatttgtagcctctccaagcgaagctgctctacctcctggttgggtaaaagatggaagaaggggaaggagaaataagatcagtgccttgcttcatgcttctgcaccctgactgtccctctatatctaacctctcaggaatgcagggagaaggaagacactggctaaacaaggaaaattctgggacccaaccctatagccccaaatttccacagatgttttctgttctacacggagagacaaacagagaaccaaaatccctgagctgacccccacagcagtcttagttcccttttcacacccagcatttttctctcccggcctgggtacctgcaggtaggagaggtgatactccagcaaagcctgggcattgctgatgttctctcgggtgccaacaaaaatgaagggaaccattccctagagaacagagagcagaaacgatggatcagaaaggaaaatgaaatggaaggattaacgccgcccagtctcctaggggagcctgcccagtgggatcattctgggctctaaatctactagtgttaaacaactttccgtactccaccctctcaaagaacaatcccagccctcagaggacaatcccatttacttctggaaaccaatctctatgcccacttgccccgtacccatacctcctccctggggttcttcttgtcattatcaccttccactcgaaccctcaccacaccagatttatccacaatctcctggatcactttcccgttctttccaatcactttgcctggaataggtaaatgaggaattcagccttttattttttttaaggaaataagaataaagctgatacaccgtcttccagcctcattttctttatatggattccatttacttcattctcctgcttctaggtttctgatgtgtttttacaggacaaaatgttacaatccctagaaatttattctttcatttttatcactcccattacagactgtttctctgtccttgtgaaactgggagtccacagggaggtgccaatcctggataaaagctcagaatcactgtagagaatcttgattctgacctctaactgtatatacacaccaccaactcaccaaccaggttcctgggcacttgcactgagtcctcagaaaactcaaggtagcttcgggcctgtcggcaagcctcgggagtctaaaggaagaacagcagggagttgttactaaaacagaagaccagctggatgtggtggctcacgcctgtaatcccagcactttgggaggctggaggcaggtggataaattgagctcaagagttcaagactagcctgggcaatatggtgaaacgccatctctactaaaaatacaaaaatcaaaatacaaaaatactaaaatactaaaaatacaaaattggtggctcacgtctctaatcccagctactccggaggctgaggcaggagatttcttgaacccaggaggcagaggttgcaataagctgagattgtgccactgcactctagcccgggcaacagagtgagttagactccatctcataaaaaaaaaaaattaaacaaataaataacttaaaaaaaaaaacagaggaccttggccaggcacagcggctcacacccataatctcaacagtttcggaggctaagaagggaggattgcttgaggctaggagttaacaaccagcttgggcaacagagatctggtctatttttttgattttttggtctcactctattgactatgttgcccaggttggttcagtggcaccatcatggtgtactgcagccttgactttccaggctcaagtgatcctcctgcctccgcctcccaagtagccaagtagctggggccacagatgcatgccaccacgctcagttaacgttttttggtttttggtttttttggggggtaaagacagggtctctctatgttgtccaggttgttctccaactcccaggctcaagtgatcctcccctctatcttcccatttcagcctcccaagtacctgcgactacaggtacgcaccactacttccagctaatttttaaatttttgtagagattgggtctcactatgttgcacaggctggtctcaaactcctaggctcaagtgatcctctcactttgacctccgaaggtgctgggattacaggtgtgagccactgtgcccagtttgaggcttattttctacttcggcctctcttccctctatcccctaagagacccagaagaaagacatcctttgctgacctccccatagatgcggaaagtgcaggtctcttcacccaactcaatggcggtcaccccaggtacttttcgggcctgctggatgttggcaccgtgagtcccaattgccagtcccatcaggtcctctcgcactgtgaactcctcttggaaggctgctgccaactgcttgcttgtctgaaaggaaaagtcactgtaggaatcatggtggtagaatctcacagtcccaggcacacgaccctttgcataacttaaataaggaaaactgtgtgatattaatagaaagctagaaccactctggagtccgcggaccacgaggacctgtgtggaaaggtcaggaactttttgttttttctttgagatggcgtctcgctctgtcgcccaggctggagtgcagtggcgcgatctcagctcactgcaacctccgcctctcgacttcaagtgattctcatgcctcggcctcctgagtagctacgactacaggtgtccaccaccatgcctggctaatttctgtatttttagtagagacaaggtttcaccatgttggccaggctggtctcaaactcctgacctcaggtgatccgcccgcctcagcctcccaaagtgctgggattaccggcataagccaccacgcccggccaaggtcaggaacttttaattccactccttccaaataccagtggtttgtgggggaggaaaggtaaagagggcagagtttggactgggacacaccgaagttctggatttggccctaacagtatctgtccctaagagtatctatctgtgtgatcttaaacaaaacatactctgcctcttgtgtcatctgctaagtgattatatccaacttatcttattctcaagactagcaagaggattagacaaggctggtgtgaaagtacttctcacaaggtacatgcaagtgtaaggaactcttaccttaatcaaacaaatatcaactcatccccaaataaaactcaacaacttaagtaaaaagtgaggggtaggctgtgcgcggtggctcacgcctgtaattccagcactgtgggaggctgaggcaggtggatcacaaggtcaggagatcaagaccatcctgccaacatagtgaaaccccatctctattaaaaatacaaaaattagctggccttggtggggtgtgcctataatcccagctgcttgggaggctgaggcaggagaattgcttgaaccagggagttggaggttacagtgagccgaggtcatgccactgcactccagcctggtgacagagcaaaactctgtctcaaaaaaaagtgaggggttaagaaaaacagaaaacatgcctctagaacaccaggctttcacttcatttctcaatcagtccttagaggaacccctgggttcaggggcaggaagacaggaaaggttttagaggagtgaatcccatgttgtaagcaccaaatagaaacaatacctgaaaggagacattcctagattgaaatacactacttcccacttccaagttggataggactgaattataccaaggatttataccaggcaagaagagaaagttggaaaaataaactaagttgagtgttcaaaatcactacattaggaggggaggggaagagatctacaatgacctataagcgtcttctagataagcttgcagaacagctgggttttcttttttttttttcttttttttgagatggggtctgtcacccaggctagagtgcagtggcatgatctctgctcactgcaacttctgcctccctttttttgtatttttagtagagaaggggtttcaccatgctggccagactggtctcaaactcctaacctcaggcaatccacctgcctcggcttcccaaagtgctgggattgcaggcgtgagccgctgcacccggcccctttccggtttttagaggcttcactactaggcatgactgattaaatcactgatcctcagtgattgccttaacctttggccccattcccctcccaggaagttggtgggggtgaggctgaaagttccaaccctctaatcatgaagccacctagaggggctagccatgaatcaactcatcagcacacaaaaacacacatcactggagattccaaggattttagaagttgaatgccaggagcctggtcaggagaccaaatatgtatctctcagtatcacagagcctgtcagtcctactggttttactcgtaaaatttatcctacataaaactactctctctctcttcctttagcactccagttcaagtttctcacctggactactgtgctctgttcctgcttccattcttgcccccctttccatctgtcattgaaacaggagtttaaaacagaaggcactttcggccgggcacagtggctctcgcctgtaatcccagcactttgggaggccgaggtgggtggatcacgaggtcaggagatcaagaccatcctggctaacacggtgaaaccccatctctactaaaaaaaaatacaaaaaaatcagccgggcgtggtggcaggcgcctgtagtcccagcttctcgtgaggctgaggcaggagaatggcgtgaacttgggaggtggagcttgcagtgagccgagatcacgccaatgcactccagcctgggtgacagagcgagactccgtctcaaaaacaaaacaaaacaaaacaaaacaaaaaaccagaaggcactgttaactcaatggcttctcagtatacgcacaataaaatcccccctcctcagcctaccgtacatgtcttacatgatctactctctgaccgaattttgtatcggtctccctttgctcactctgcgctaactacacaagctgcagtgagctgagatcgcactactgcactccagcctggacgacagaatgagactccgtctcaaaaaattaaaaaacaacaacaaaaattaggccgggtgcaatgggtcatgtctataatcccagcactttgggaggccaaggcaagtggatcccttgaggccaggggttcgcgaccagcctagccaacatggtgaaactccgtctctactaaaaatactgaaattagggccaggtatagtggctcatgcctgtaatcccagtactttgggaggccaaggcaggtggatcacctgcggtcgggagttcaaaaccagcctgggcaacatggtgaaacactaaaaaagcaaaaattatccagacgtgggggcgcgtgcctattatcccagctacctgggaggccgaggcacaagaatcgcttgaacccaggagcgagaggttgcagggagcggagattgtgccattgcactccagcctgggtgacagagggaaactgtctccaaaaaaaaaaaaaaaatagccaggtatggtggcatgcacctgtaatcccacccacccaaaggctgaggtgagaggatcacttgagctcggggggtagagactgcagtgagctgagatcgcaccactacatacactccagcctggataacagactgagactccatctcaaaacaaaaaacaaaaacaaaaaataaagtttgtatcatctgaaggtaatggtgaatttttacctgccagtgccctgagcaggatccctgaagaagtcaaagattatcatgacccagaaattgcacaggcacagaaaaaagcctcccaaaaagatcaattcccttgataaatggaaatggtattcaaacacacacaccctattcacttagaatagtataataccaacgaaagggaatctgacaattatacgatgtcagaattcaaaaagatctcacagaaatactctagtcaggccaggcgtggtggctgacacctgtaatcccaacattttgggaggtcgaggtgggcggatcacctgaggtccatagtttgagatcagcctggccaacatggtgaaaccccatctctactaaaaaagacaaaaattagccaggtgtgatggcacacacctgtaatcccagctacttgggaggctgaggcaggagaatcgcttcaatctgggaggtggaggttgcagtaagccaagatagcgccactgcgctctagcctgggcgacagagacgctatctcaaaaaacaaacaaaaaaacaagaaatatcctttttttctttgagatggagtttcactcttgttgcccaggctggagtacaatggtgtgatctcggctcactgcaacctccgcctcccaggttcaagcgattctcctgcctcagcctcccgagtagctgggacaacaggcgcctgccaccacgcctggctaatttttgtagttttagtagagacggggtttcacccatgttggccaggctggtcttgaactcccgacctcaggtgatctgcccgcctcagcctcccaaagtgctgggattacagacgtgggccaccgcgcccagtcatatcctttttttctttgagacagagtttcactcttgtcacccaggctgaagtgcaatggcgcaatcttggctcactgcaacctccacttcccaggttcaagcgattctcctgcctcagtctctcgagtagctgaaattacaggcatgtgccaccacgcccagctgatttttgtcttcttagtaaagatggggtttcaccagtctcgactcccaacctcggattgatctgcctgcctcggcctcccaaagtgctaaagtgctgcgattaaaggcgtgagccaccgcgcccaccctaaaaaataaatattctagtctaggctgcatgtggtggctcacacctgtaatcctagcactttgcaaagtacaggcagatggatctcttgagcctagaagttcaagaccaaggccgggcgcagcggctcatgtctgtaatcccagcactttgggaggccgaggcaggtggatcatgaggtcaggagtttgagaccagcctggtcaacatggtgaaaccccatcaatactaaaaatacaaaaatgagctgggtgtggtggcacaagcctgtagtcccagctactcaggaggctgaggcgggagaatcgcttgaacccagaaggtggatgttgcagtcagctgagactataccattacactacagcctgggtgacaaagtgagactccgtctcaaaaaaaaccattcagccaggtgtggtggctcacgcctgtaatcccagcactttgggaggctgaggcgggtggatcacatgaggccaggagttcgaggccagcttgggcaacatggcaaaaccccatcttactaataatacaaaacttagccgggtgtggtggcgcacgcctgtaatcccagctactcagaaggctgaggcatgagaatcgcttaaacacaggaggcaggggttgcagtgagccgagatcgtgtcattgcactccagcctaggcgacacagcgagactctgtctcccaaaaaaaaaaaaaaaaaattggctaaaagaaatttgaaaataattgcactataccatgatagagctctgccatctggaggagtctgagataaaatagctgacccaggtttaattgcccagaaaaagccttagtctttgttctgtaaacacaagatcatggatggaggacagggtaggaagggaggaagacaatacccttcagcagaaggaaaaggagctaaaagttacctctaggtgcttggtagcttcttcattgcgggacataagtagcagtttggtgcgcaggcttcggaaatgcatatcacccagcagagatgctcgcttcacaggggcttctgtggttgactgggaggaaaccagtgggaaagtcattaaaactggcttggaataaacactaagggagagccagggactagaaatcaggatgcctaagtcccgggaaaagggttaagaaatgaagctaggagaccgggcgcggtggctcatgcctgcaatcccaggactttgggaggccaaggcaggcggatcacgaggtcatgagatcgagaccatcctggccaacgtggtgaaaccctgtctttactaaaaatacaaaaattagctgggcgtggtggcacatgcctataatcccagctactccagaggctgaggcaggagaatcgcttgaacccgggagtcggaggttgcagtgagccgagactgcgccactgcactctagcctggtgacagaacaatactctgttttcaaaaaaaaaagaaatgaagctaggaaggaggagactcattgtcagtcccacaaaggctgactatcagggtactgaaggaaaatggtttagagagaaagcaaggagcaagcataaggtgagagctacatactctatttctgaaagtccaaatatcaagagagggtctctaacccagatggcaacatgattatcaggtttaaaaaaaaagggtcagaggccgggcgtggtggctcacgcctgtgatcccagcactttgggaggccaaggcgggcggatcacgacgtcaggagttcaagaccagcctgaccaatatggtgaaaccctgtttctactaaaaatacaaaaattagccgggcatgtcgggcgcggtggctcacgtctgtaatcccagcactttgggaggccgaggcgggtggatcaggagatcagcagttcaggaccagcctggccaacatggtgaaaccctgtctctactaaaaacacaaaaaaaaattagccaggcgcaatggcaggcgcctgtaatcccagctactcgggaggctgaggcaggagaatcgcttcaatctgggaggtggaggttgcagtgagccgagatcgcgccactgcactccagcctgggcgacagagtgagattccatctcaaaaaaaaaaaaattagccggcgtggtgacgcacacctgtaatcccagctactcaggaggctgaggcaggagaattgcttgaacccgggaggtggaggttgcagtgagccgagatcgtgccattgttctccagcctgggtgacaagagtgagacttcgtctcaaaaaaaagaaaaaaaaaaggtagggctacctgggcctgtaggagtcaggagcaataaagtcctcttgacaaataaatataagcacatttaagcccttctctttctgcaaaagggttaaaaagggaaaaagaaaaaatgttcaaaaggcttatgtgaaattcaggcagaataaactcaccagaatgaagagctcactgtttgtgatgttgagaaagatgcagttggctcccagggctttcttgaactctttatggacgttttcattggagcagctgcagaggaaaaaagtactcagcgggcagaatgcagagagtacagtgaagagttcgggggaggctggacatggtggtttgcacctgtaatcctagcactttgggaggctagggcaggatgatcacttgaagtcaggagttcaagactagcatgggcaacatagtgagaccctgtctctattaaaaaaaaaaaaaaaaattcagagaagcagggctgagtaaataagaaaagaaaagggactgggccgggtgcggtggctcacgcctgtaatcccagcactttgggaggctgaggcaggcggatcacttgaggtcaggagtttgagaccagcctgaccaacatggagaaaccctgtctctactaaaaatacaaaattagccgggtgtggtggtgcatgcctgtaatcccagctactcgggaggctgaggcaggagaatcgcctgaacctaggaggtggaggttgcggtgagccgagattgtgccactgcactccagcctgggcaacaagagcaaaactctgtctccaaaaaaaaaaaaaaaagaaagaaaggaaaagaaaagaagagggaccacagttaaagaacaaggatgggaaaataaagaaactaagtgtcttcttagcaagaagggctctagtagagggccaggggaacaacagagaaaactgcaaagtgggagtgatgcctgggagaaataaagccagagattagggctgtaaagagggccctcattcccaccatccttaacactcacgcttctctcagatcctcgggcacagccatggtaaccttgaagaagctgcctttggttgcaaggggattgggattaactggccgaagtcgctccagggtaacaatttcattgtaggtggcatcacaggcagcatattcaatgacatagaactggcacatggtaaaaaaggagaagttgtggatgacctgagcaactttctatgaataacatatttgtttcagtagttctccaaaggcattcccagtcactcacatctcccttcatcatccgcacccgggccagccaccagccacaaggttcctgttcattggctcgagaataaacctaaagaaaagtagagaatcaaagagatattgaagaccacccaaaagcatcaagaaagggatgaggaggccgggcatggtggggctcacacctgtaatctcagcgctttgggaggctgaggcaaaaggactgcttatgcccaggagttcaagaccagcttgggcaacataaacaatagaacaaccattaagatatttggggctgctgggcacagtggctcaagcttataatcccagcactttggaaggccaaggtgggaggatctcttgagctcaggagttcaagaacgatctgggcaacacagtgagaccccacttccacgaaaaaaaaagaggccaagcgcggtggcttatgcccataatcccaggactttggctgaggtgggctgatcacctgaagtcaggagttcaagaccagcctggccaacatggtaaaaccccacctctactaaaaatacaaaaattagccgggtgtggtgccacatgcctgtactccaagctacacaggaggctgaggcaggagaatcacttgaaccaggaggtggaggttgcagtgagctgagaccgcgccactgcactccagcttgggcaacagagtgagacttcatctcaaaaagaaaaaaaaggtatttgggatgcatctttttttttttttttttgagacagagtttcgctcttggtgctcaggctggagtgcaatggcacaatctcagctcactgcaacctccacttcctgggttcaagcgattctcctgcctcagcctcccaagtagctgggattataggcgcccgccaccacgcccagctaattttttgtatttttagtagagatggggtttcatcatgttggccaggctggtcttgaactcctgacctcaggtgatctgccccactcgacctctcaaagtgctgggatttcaggtgtgagccactgcatccagcctgggatgtatcttaaaccaaggatacaagaaaccagaggaaggaactaattaaaatcagaggacggcagggcatggtggctcatgcctgtaatcccagcactttgggaagctgaggcgggtggatcacctgaagtcagaaattcaagactagcctggccaacatggtgaaaccatgtctttacaaaaatgcaaaaattacccgagcatgatggcaggtgcttgtaatcccagctacttgggaggctgaggtggaagaattgcttgaacccaagaggcggaggttgcagttagctgagatcgcgccactgcactccagcctgggcaacagagcaagactccatctcaaaacaacaacaacaacaacaacaaaaaaatcagagggcactggattttagatgttgttaccataaatggaaggcaaatcgcctgaaactggggatgttcctgagagtttggctgatcacaacagtgataaaaggggaactgttgcattttacatttccataggctacatggctggatatggcttagttggggaggaaggaacatgaaccaaccagagaaaagcctagaatcctggggaaaagtgacatttagaaaggtgtactccacagcccttacctccacttcatccccttctgtgatctccttattatagtcagctggaggtggtagccggacatccccaaaaggaatttgtctctcactctgccagctataatagaaacaataatatgaaaaagctactctgactgatatggttgcccatttctttacaaaagggttattgcctcagctgggcgagttccacctatctggataattagaggctaaaccccaggccctgctccatagtagtgtcttccatctctttctagactctaaatactgggtcaaatgcccccaccctcaccaaattctcagccctttcctctcctgggatccatatgagttcccacccaaaccctcagctctcccaacctattacatgcctcataggactcagctgccccctcttctccactctccttctaggacctagtatgctggattctctattcccaaggtcttacttgttttcaaagaagatggtgacagagtcttcatggacatccttcacaaagccctagaatggattttagaaaaaagcaaaaaaaataaaatgaccttttacttccaccttagccatcaagggaataagacaccacaaaaccttaaacttgagttttagatagggacacaagtggtgtaatgagacagcctgaaaggctgcactggggaaagaatatgggcagtcaaacagagaaaggaaatgatattgtcatggagaggtgtatgtaccacctgcatcagaacagcctggaaaccaatgatctactcaggctcccacaggggcctccctatctgtctgcctcctgttgtgctaagcagcctgccagagttcaattaaaataccaacaacattcagcaaggctaagaatatcccatgagacagtgtgaggctgtcctggaacacctagaggacatgaggatctgtcgagagagaagggcctacctccgcaatacagcaagagatctgagcagactcgctgccctgatgcatgggtcctaagacaataatcggaacactagacaagttcaaaattgtgatgaacacaatttacagaaggaaaaattaagacttaatttaaaaacatcggttttttaatactagaattgaatctagaatgacactgataatttataaaggataataaaatttatggaagactccaatcttgatattttgacaagagcaagagggatgactgaacagctgatccacctcctgtggtctgtgtcctcactaaggaggccaaagccatgcattcacccctatgctcccaatttttctaccttctccctatttttcacatacaattagggatttctaattttgaaaaaggtctagcttatgaatttattattttatcaactgtgcttttggtttcatatctaagaaatctttgcccaggccaggcacagtggctcacgcctataatcccagcactttgggaggacgaggcaggcagatcacctgaggtcaggagttcgagaccagcctgccaacatggtgaaaccccgtctctactaaaaatacaaaaattagccaggtgtggtggtgcatgtctgtaatcccagctatttgggaggctgaggaaagagaatcacttgaacctgagagtcagaggttgcagtgagccaagatcatgccattgcactccagcctgggcaacaagagcaaaactccatctcaaaaaaaaaaaaaagaaaaagaaaaagaaatctttgcctaatccaaggccacaaaggttttctcttatgtcttcttcttaaacttttagttttttgttttacatttacatctataatcctttatttttagacagagtctcactctgtcacccaggctggagtgtaatggcgcaatcttggcccactgcaacctccaccccccgggttcaagcaattctcctgcctcagcctcacgagtagctgagattacaggcaaccgccaccacaccaggctaattttttatatttttagtagagacggggtttcaccatcttggccaggttggtctcgaactcctgacctcaggtgatccatctgcctcagcctcccaaagctggaattaaagatgtgagccactgtgcccagcctatgatccattttgaattaaattttatatataaggtgaggtattgatcaatgttttttaaatttttaaattcttatttatttttttgagacagagtttcgctcttgttgcccacgctggagtgcaatggtgcaaccttggctcaccgcaacctccgcctcccaggttcaagcaattctgcctcagcctcccaagtagctgggattacaggcatgggccacgaccctggctaattctgtatttttaagagagacagggtttctccatgttcgtcagactggtctcaaactcccgacctctggtgatccacccgcctcagcctcccaaagtgctgggattacaggtatgaaccatcgcaccaggccacttttttttatttttaatatatttttaaattaaaatttttttttaatagagacagggtttcgctatgttgcccaggctggtcttgaactcctggactcaagcaatgcacccgccttagcctccaagaatgttggaattacaggtgtgaccactgtgcccagcccattttttacctaaagatatcttgttccagcactgtctgttgaagactatcctttctggccaggggcggtagcacacgcctgtaatcccaacactgggaggccgaggctggcagatcagctgaggccatgagttcgagactagtctggccaatatggcaaaatcccattgctactaaaaaaaaaaaaaaataataataataataatatataaattagccaggcgtggtggcacatggctgtaacctcagttattcagggtggctgaggcatgaaaatcacttgaagccaggagttagagactgcagtcagtcaagatcatgccatcgcactgcagcctggacaacagggcaaactctgcctcaaaaaaaaaaaaagaagaaaagaagaaaagaaaagacaagactatcctttcttagctgaattgaactgccttttcatttctatcgaaaatcaggaagggcaatttaatgtataatgacagaagattggtagttgatggaggacttttgggagtgacagaaatgttcattcctttgattgcagtgatggactcagttacatacatgtcaaaacttaacaaatggcacactttaaatatgtctactttgttgtatgtcaatttcagctcaataaagatgttttttaaaaaaattagagagcccatacaacacagggaaacctcatctctgcaaaaaatttataaattagcagggtatgatggcttgtgcctgtagtcccagctatttaggaggctaaggtgggaggatcacttgagccagggaggtcgaggctgtgatgagctgtgattgcaccactgcactccatagcttgggcaacacagcaagaccgtgactcaaaaaacaaaataaataaacaaaaataaaagaattagaggtttcaaaaggctaatacacaagaactattcatgagctttgctgctagggacaaaggctaagcttaggagagaaaacaccaaaaatgcccttggcaaatgcacagctcccacctcatagaactaatcaatcacaaacacttaccagattgctatttccttacgatgggaaaatctaagcctgcatttcactcttcatacaagccacctttctcgtctttagggatatgtcttgctatagaggctgcagtcagtcaagatcattcttgactgaatgttctttcttagagccttactactgcccaaggctttaattactactggtacttcctggcctcttttttacccatgctttttctttctctgacattctcttctccagaaatgttttttctactcttcattcagatttttttcctttttcaaaaagaacctgagttatgagcatgttcattcaggtttaatgccaactcctactgttctccattcaagtcttctgaggcacttttacttctacttgcctgggtctctcttcccttttgggttcttcccttagctcctgctcaagtgtcctccccactcccacaaccactaatattttatccattccctcttcttttccctgtaatcccaacacttggaggccgaggtcggtagatcagctgaggccaggagttcgagaccagtctggccaatatggcaaaaccccattgctactatatatatatgtatacatatacatatatatacacatacatatatatgtatatatacatgtatatgtatatatatacatgtatatgtatacatatatatacatgtatatgtatacatatatatatacatgtatatgtatacatatatatatacatgtatatgtatacatgtatgtatatatatacacacacacacacacacatatatataaattagccaggcgtggtggcacatggctgtaacctcagctattcagggtggctgagatatgagaatcacttgaagccaggaggcagaggctgcagggtcgtctggatttctagaattattccaaccagcctcttccgctgactttatccagttctttacccaaaatgtctactccaagccttagaagtagtttatcaaggcaggagttacactgacagaaagaagtggaaaagagacagagatgagaatcactaatttactgcttttgtggagagatttctactcctagatatattcaaatcggctatgcctatggtgtaatccaattctcctccaccatgttaggcttggccccagggtgagcagcaatattaccctagttttcccagctaccatgacttccaaggcagaaatgcaaagctcagaatggagtaatctctcacattactcagcagttcaaccaaatctcactcaacccttatatttccagggtctttttccttcaattagtctccaaaactagctctgtccccaacttcatattccaatcctgtctctgctcctaaattccacccattcatcccatactagtttttttctccaagggtatctgtggtggaagtgagccccaagttctgctcagtctacgctcattgtgaaaataagcaggtgaaggcaagagcaggtgggtggaatgtattagggagccacctagatccagaggataacttgattcagtggccatagcatcacctggctttggcttctggagcctggcaccaagccagcagaggaagagagagccccaggttcctaggtactttggtttcctcaaattagaagatataaaattggtccccaccttcaccgtcttctagttctagactcccaaagcaaaggagggggttctaggagaagagcaggaacagtctgagtaaaaaccaagtactgaagctgaggatgccatgttgattaagaaaggaatggggattaggatatccagatgaggtttggagtaggaagattgcgccctggacggtgaatacttcatttgggagagtacaacttaaagaataaaatacattaggccattttgtacgtcttaagccattttgtacgtcttaagcatgatgactgcggtttcaagctcacggtgaggtatgcctccctcaacccttgttacggatgccagtctgacatgaaaaaaaaaaggacggaaaaaaagagtaaattctgacaaacttaattttcagatagctacaaaataacttagatcccagatctaatattttatcctttaagaaaactgacgggagggcgtggtggctcacgcctgtaatcccagcaccttgggaggccaaggcgggcgaatctcttgaagtcaggagtcagaaaccagcctggccaacatagcgaaaccccgtctctactgaaaatacaaaaattagccaggcatggtgttgcacacctgtaatcccagctactcgggaggctgaggcacaagaatcacttgaacctgggaggcggaggctgcagtgagacgacatcacgccactgtactccagcctggatgacagagggagaccctgtctcaaataaaaaaaaaaggaaaagaaagaaaagaaaactgacaacagggcccaattctgagagaggagaaagggaccttcccaaatgtacaattccagaagcagtgtaaatactccctgacccatcccaagtttgctgagtcatgaatattaaatcagcagcaaggtcaaaacggataagtatctgtagggtactgagagtggaagattagcctgaatttagggatttgtggtttttaactcaggaacagggcagaaaatgctaacctgcccagatccacattaccacattacctggctttcagctcaaccccaaactctactctctgaatcacagtatcctggtccccatctattcaagtctatcactgccacagcacacaggagaaagggaaaagattcagagagactttctgctggacacttatatgtgggacagaaaacgtgtcccttcccagccatctcatacagttcatttgaactggataccaatctttctcagctgtgcagggctcctacgcttcctagaacaaagcaaacatcatatcttgatcttggactcaacttaagaatcacttttcttggaactcagaatttgggggtggtaaggacccagatgaaggaaaagataccaaggtaaacagggagggccactttaggaagctatttcaacaaaggtaatgcaagtttggggaaaaggatatgagagacaaatgtgctctatcaaaagcagaaaggaattagagacttttgccaaagaaaacagaaatgctatggaggcaggctagaagaaaaagtcccaagagttaggcaagtatgcacaaaatgacaaaaagagatcagcagggagcttccttcagctagacagggaataaggtgattcctggggattacacaggaatacagaaatattaggagaaaaagctaaaaacttgaattgagaaggtaagttagacatgggtacccacagtcaccgcagagaaataaatctgatgagggaagtaaggcaaaaatgggtaagtatgaagagtgagtaaaaaatgactacaatggccgggcgcggtggctcacgcctgtaatcccagcactttgggaggccgaagcaggtggatcactaggtcaggagatcgagaccatcctggctaacacagtgaaaccccgtctctactaaaaatacaaaaaaatagccgggcatggtggtgggcacctgtagtcccagctactcgggaggctgaggcaggagaatggcgcgaaccagggaggcggagcttgcagtgagccaagatcgcaccactgcactccaagcctgggcaacagggcgagactccatctcaaaaaaaaaaaaaaaaaaaaaaaaaatgactacaatgcacttagcaactgaagtacaggcagaaaccacccaagagaaattacaagaccctctgcagttatagaaaaatatgacttagagaaggagtcaaagaaagacatttccaagggcatgagaaactagagaggactacagtgggggaaaaaggcctgaggggaactgaaggaaagggggaagggggatccactcttaacaagtgatgccatgggaaggtatctcttccccagctccccagggtgaaatcaaagaatgagacagaaatcaggagagtctctaggacaattccaggcatcaaatccaagaggttcagaataccaacagtcacacaaagaaaaactcttgggaggcaagaaagggctctctctggcttaatctaaatgggaaaaaaatgtcctagaaaatagattcagagcagataaggaaggtggtattataaggagttctaaggaaccaaatcctgggcaaagggggaggtgaaataaggaagggtctttgaaagatgatcccgtcttccaaaaaaggttgtcagattcccgaactgggatagttggccaagagtcttcaagaagtggaaatcttaagataaacagaagggaacctcataagcttcctttcagagatccttttagagattatgactatgaagcttacatgcctcaagacgaagaaactatatgaatgacctgaaggtatctgaggtctaagtgagacctcaaatccattcctgagtagaatggtagagcagtgggtcttgagatcaaggtgtggtggggagagagacttgcgaaagatgccaccttatggctggctgggaagcaacttgactgatccaacccagggttcctgaggtcaaagatgccaaacgtcgtaaatggatctgaccatttctccttggcttgggaaccggaatataagatgaaagtggggtgagtgttccagagccagtaggcagaggcctctctgaggaagatgaaaggatcttttacgggacagagggccttcccaaagggaccgtgtggaagaaagacaattctccatgtgcttggatcgtggggaagatgtgattaaggtctaaggtatgtcttccaccagacaacggacacagtcaattagaagctgggtaaaggggtctctcctgcggagcggggagcgccaagccagggacaataatggcctgaagttcattctcccggagatgggggtagaagcaggtgcaggtgccttagaggggtcaaaaataagaggaacagggttcactctaagcggtctcccagggaaggctgcgggttggagcaagggtccaagattctaagggccaggactcagctccagaagctcgatcccgccccacgcgttcctgctccggccaggggagggggctaaggaccggcgtccccagtcggcgcgccgtctcaccttgtagaaggccccgttggagccgcgcacctcgacgggcagtcccggctccacatcccccccagaggccaggccgcccatggcgccgccaccgcctccgactcccccggcggcggctgcagcagcagtctgagtgcgggccgggccaggcccccggcgtctccccggaggaggagccggagggggagccgcggggggcgggagccgggccggccccacggcggccctgccacagccaacgagcagggggccggggccgggccgctccccgtccgccgccgccgccttggtctccgccaccgtgagggaaacggccgccgccgccgctgccttcgtcacctcagcttccgcccgccgccgcccccgctgctgcctcagtcccgggacccgctgctgccgctgccgctccacagcctccacctccccctgccaccgccgcctactgcgcaggcgcaccgggcacccgcccgctgcgcgcggggccccgagggccaccgcgcaggcgtcaaggttagagccccagctagcgccagctagcgcatcggggcttccacattccctttcactctctcactccccctcctggtcgcttgctagcgcttgcgcagaacaagattagccttctttcttcaccgctccaccgcccagccaccccgtctcttcctttccccgccccacaacactgagaaccaaccaatcagggggagggaggggccgggctcgctcagtccgattgggcggcgtccgcacagtcacacagcgctcaggccacacccactccgccgccgctggccccaccgggcttggacaagttagggatgggcatgcgcctgaacgactgcttggtcactttccccacctttgtctttcttggtgcgcacgctccaaaaagaaaaaaaaaagaagaggagtcgccgcaaggaaaaaggtgcttggtgcgcacgcgctgagctttaccctcttcgcgtatgcatcgccgatattttaagaatctgtaactctctactgtagtagatttaacagtcatggctcttaccttgaagagattgtgatacaatgaaagttttggccgggcgcggtggctcacgcctgtaatcccagcgctctgggaggccgaggcaggtggatcacctgaggtcctcggatcacctgaggtcaggggttcgagaccagcgtggccaaaatggtgaaacccacccccccccccaccccgcatctaataaaatacaaaaattagccgggcgtggtgacacgcgcctgtaatcccagatactcgggaggctgaggcaggagactaccttgaacctgggaggcagaagttgcagtgagccaagatcgcaccattgcactccagcctgggcgacagagcaagactcagtctcaaaaaaaaaaaaaaaagaaagaaagaatagaaagaaagctttaagaatagtttcagacgggcgctgtggctcactcctgtaatcccagcactttaggaggctcaggcggtggatcacttgagcccaaaagtttgacaccagcctcaacagggcgaaaccctgtttctactaaaaatacaaaaattaggacgggcgcggtggctcaggcctgtaatcccagcactttgggaggccgagatcacgggcgggcggatcacgaggtcaggagatggagaccattctggccaacatggtgaaacctcgtctctactaaaatacaaaaaattagccgtggtagttccagctactcggaaggagtcccagctactcaggaggctgaggcaggagaatcgcttgaacctaggaaggtggaggttgcagtgagtggatatcatgccaccacactccagcctgggcaatgagtgaaatttcttctttaaaaataataataatggcagggcgcggtggctcatgcctataatcccaacactttgggaggccgagacgggcggatcacgaggtcaggagatcgagaccatcctggctaacacggtgaaaccccatctcaactaaaaatacaaaaaaaaaaaaaaaaaaaaaaaattagctgggcgtggtggcgggcgcctgtagtcccagctactcgggaggctgaggcaggagaatggcgtgaacccaggaggcggaggttgcagtgagcggagatcgtgccactgcactccagctggggcgacagagcgagactccatctcaacaacaacaacaacaaataataataatagtggcccggcgcggtggctcacgcctgtaatcccagcactttgggaggccaagatgggtggatcacaaggtcaggagttcaagaccagcctggccaacatggtgaaaccccatctctactaaaaatacaaaaattagctgggcatggtggtgcatgcctgtaaacccagctacttgggaggctgaggcaagagaattgcttgaacctgggaggcagaggttgcagtgagcccagattgtgccattgcactccagcctgggcaaaaagagcgacactctgtctcaaaaaatagtaataataataataaataatgctggggaaattcaaaataggaaaaactgtcatgaaataagggtagtagcaggaaaacttcacattctgggagttgtcctatgttccatccacttcttggattagagtaaatggtaatgccaatcatggaagagataacataggagataaaggtttagaaaataaggtgatgaatttacttttattttttttttgccctttgagcttagccaccacatctggctaatttttaaatttttgtatttaatggtggagacaaacagacttggaagtctctgacttcatagtgtgatggcagaagaaagacactggaaaaattattaatatttataataattattaatattgcaaccatggccaggcacagggctcatgcctgtaatcccagcactttgggaggctgaggcgggtggatcacctgaggtcacctgaggtcaggagttcaagaccagtctggtgaaattccatctctactaaaaatacaaaaattagctgggcatggtggcacgcgcttgtagtcccagctactcgggagactgaggcaggagaatcgcttgcacccaggaggcagaggttgcagtgagccaagattgtgccactgcactccagcctgggtgacagagcgagactccatctcaaaaaattaaaataaaaaacaaaaataaataaaggcgatagaagaaaggaaaataaagtataagaaaattaaaggattagtccatgggatacaacatctgaataaccagaattccagaaagtgataacagaaataattatctggaaaggataaaatcatctaaaatcaatagtaataattattcaacaaaattttccaaggccaggtgtggtggctcatgcctgtaatcctggcactttgcgaggctgaagcaggcagatcacttgagctcgggcgttcaggagcagcctgggcaacatggcgaaaccctttctctaccaaaactacaaaaattagctgggtgcggcggctcacgcctgtaatcccagcactttgggatgccgaggtgggtggatcatctgaggtcaggagtttgagaccagcctggccaacatggtgaaaccccatctctactaaaaatataaaaattagccacacgtggtagcgtgtgcctgtaatcccaactactcaggaagctgagggaggagaatctcttgaacttgggaggctgaagttgcagtgagccgagatcacaccactgcactacatacagcctgggtgacagagaaagattctgtctcaaaaaaaaaaattatttccaacctcgtttcctatacctagccacactctcaatatttttttgttgttgagatagagtcttactctgccactcagactggagtgcagtggtatgatctcggctcactgcaacctctgcctcccaggttccagtgattctcttgcctcagcctcctgagtagctgtgattataggtgcccactgccacagctggctaggtttgttttttttgtttttgtttttgtttttgttttttttgtatttttagtaaagacggggtttcaccacgttggccaggctggtctcaaactcctcacctcaggtgggtcacccacctcggctgcccaaagtgttgggattataggcatgagccactgcgcccggcccacactctcaattaagtgcagtaatagaacagacattttcaggcttttaagttcccaacaaatttacctcccggtactctttctcaaaaagctccatcaaaataagaagagtaaacatagaaagaggaaacacaggttccaggaaacaggacgtcaacacaagagagaggcaaaggggatccccaggataaaggtgaagggagatcccaattgcgcagcctcaagatcgcctctctggactggagcaggtctaagagctttttgagaaagttcttcaaaatgacgtagattgaaatccctaagtgtttgtatatccttataagagattaattaagggagaatttggggataaattagagtacacaggaaactaagcaaacagagaggacaaggcagttattaattccagggaaaacaaaaatggtacaggaaagaaaaagaattgtaactatccacatggatcatacgtgtattcgtataatcataataatcataataatgaggccaggcatggtggctcacacctgtaatcccagcattttgggaggccgaggtgggcagatcacctgaggtcaggagttcaagaccagcctgaccaacatggagaaactccatctctactaaaaatacaaaattagccaggtgtggtggcacatgcctgtaatcccagctactcgggaggctgaagcaggagaattgcttgaacctagcaggcagaggttgcagtgagccaagatcgcgccattgcactccagcctgggcattaagggtgaaactccatctcaaaaaaaaaaaaaaatcataataatgtaaatgctaaggctggtgcggtggctcatgcctgtaatcccagcactttgggaggtcaagataggcggatcatgaggtcaggagttcgagaccagcctgaccaacatggtgaaaccccatctctactaaaaatacaaaaattagccaggcatggtggcatgcacctgtaatcccagctacccaggaggctgaggcaggacaattgcttgaacccgggaggcagaggttgcctctgcatgagccgagatcatgccattgcactccagcctgggcaacaagagcggaacttcgtctcaaaaaaaaaaaaaaaaagtaaacactaaacacaggaggatgggaagtggaggtgggatgataagcagattggaaaaatagtgcttctctttttttaacctcagtgatccgtgttctgaagggctagcttttcatcctcaacagtgcaaagccaatagctaatgcctaaacaaaaaacactggagtgcagtggctcaaacatgccccacttcagcctcaaccttaagaagtaaggccaagagcagtggcacatgcctgtaatcccagccctttgggaggccaaggcaagaggatcagttaaggccagaagttcatggttacagtgagctatgatcgtgccactgtactccagtctaggcaacagaaaaagaccctgtctctaaaaaagtaaagactccttatccctctccaaaaaaaaaaaaaaattgaaaaaattgaaaaagaaaaagagacatcaagaagtggtaatactggccaggcgtggtggctcacacctgtaatcctccctcctttgggaggccaaagtgggaggattgcttgagctctggagtccaatactagcctggacaacatagtgagacctagtctccaataaaaaatttgttgtttgtttgtttgttttttgagacagagtcttactctgttgcctaggctagagtgcagtggcacgatgttggctcactgcaacccctgcctcccgggttcaagagatcctcctgcctgagcctcccaagtagcttggattacagccgtttgcccccacatctggctaatttttgtatttttagtagagacgggtggggtttcaccatgttagccaggctggtctcgaactcctgacctcaagtgatccacccgcctcagccttccaaagtgctgggattacaggcgtgagctacagtgcccagattaataatttttttttttgtttttttgggggacggagttttgctcttgttacccaggctggagtgcaatggtgcaatctcggctctctacaacctctgcctcccaggtacaagtgattctcctgtctcagtttcccaaatagcttggattacagacatgtgccaccacacccagctaatttttttgtatttagtagagacagggtttcaccatggtagtcaggctggtcgcgaactcctgacctcaggtgagccacctgcctcggcctcccagagtgctagaattacgggcatgtgccaccgtgcccagacaaaaattttgctttcattagccaggcttgatagcacctgactgtgatcccagatacttgagaggctgaggtgggagaatcacttgagcccaggaggtcaaggttgcagtgagccatgatcgcaccactgcacttggcctgggcaacagagcaagaccctgtcacaaaaaaaaaaaaaaaaaaaaaaaaaaaaatcaagatttgcaatagccagttagctcagttggttagagccaggtgctaacaccaaggttgtggatttgatcgccacgtgggcaaatgtattatcatttatgtggatggaggattgcttgaggccaggatttcgagaccagcctggccaacacggagaaaccccatgtctactaaaaatacaaaaattatgggcttgacacagtggctcgcacctgtaatcccagcactttgggaggctgaggcgggcagatcatctgaggtcaggagtttgagaccagcctggccaacatggtgaaaacccatctctactaaaaaaaaatacaaaaattagctgggcgtggtggtgcacgcctgtaatcccagctactcaagaggttgaggcaggagaatcacttgaacctgggaggcagaggttgcagtgagccaagatcatgccactacactccagcctgggggcaacagagcgagtctccgtctaaaaaaaaaaaaaaaaaaaaaaaccagctgcataaactggtctcaaaataaagaaataaattaaatttaaataataaaataaagtacataatgtatatctgtgaaaaaaaaaatcccatggaattgggggagaaattacagaaggaggctgggagaccagtaaggaggttgtggcaattttcaaagagtgagaactttgcaagtaaggatagagctatggacagatttgagagacattttaattttttttttttagatggagttttgctctgttgcccaggctggagtgcagtggcgcaatcttggctcactgcaacctccgcctcctgggttcaagcgattctcctgcctcagcctcccaagtagctggaattacaggcatgcgccaccatgcccggctaatttttttttttttttgtatttagtagagacagggtttcaccatgttggtcaggctggtctcaaactcctgacctcaaatgatctacccgcctcggcctcccaaagtgctgggattacaggtgtgagccactacgcccagcccaagttttctttattctccctttaaaaagccattagcctaaataccctccactctgtttcccttagaatggacagaacccaggcccttttcaccccactccaatcagccccaacacctaataggatcacttttttttttcttttgtaagagggagtctcactctgtcacccaggctggagtgcagtggctcaatcttgtctcactgcaacctccacctcccgggttcaagcaattctgctgcctcagcctcccaagtagctgggattacaggtgcccaccaccacgcccagctaatttttgtatttttagtagagacagggtttcaccatgttgaccaggctggtctggaactcctgacatcaggtgatctgcccaccttggcctcccaaagtgctgggattacaggcgtgagccactgcgcctggcctggccaggatcattttatagatggctaatgaagtgatgaatgggctggagcccaaggatgtagacatgggggtggttgtgaaaatggagtgatactggagtgcaaagatattctatgaatattagtaagatctgggaccaaggtgagggtaataacattaaaaatgtaaaccctgggctgggcacggtggctcacgcctgtaatcccagtactttgggaggccgaggtggtcagatcattaggtcaggagatcgagaccatcctgactaacacagtgaaaccccgtctcaactaaaaatacaaaaaaaaaaaaaattagctgggcgtggtggcaggcgcctgtggtcccagctacttgggaggctgagggaggagaatggcacgaacctgagaggcagagcttgcagtgagccgagatcgcgccactgcactccagcctaggcgaaagagcgagactccgtctcaaaaaaaaaaaaaaagtaaactctgaaaaccaaagacaaaacaagatgggggcaagataaattttggaagtattggccgggcacagtggctcacgcctgcaatcccagcacttttggaggccgaggtgggcagatcacctgaggtcagaattggagaccagcctgaccaacatggagaaacctcatctctactagaaacacaaaattagccaggcgtagtggcgcatgcctgtaatcccagctactcaggaggctgaggcaggagaactgcttggacccaggaggtggaggttgcagtgagtgagatcgtgccatttcactccaacctgggcaacaagagtgaaactccatctcaaacaaacaaacaaaattttggaagtattaagtttcctagtttatactcttttatcttctgcattagtgattaaagtttgttttttgagacagggctttgctctgtcacccaggctagagtgcattgacaggttctcagttcactgtagcctcaacctcccaggctcaagccgtcctcccatctcagccccccagtagctgggactacaggcatttgccaccaagctcggctaatgtttttgtattttttgcagtgaccgggttttgccctgttgcccaggttagtcttgaactcttggactctattgatctacccaccttggttttccaaaatgctgggattataggcgtgagccactgtacccaacctattattttttttttgttttgagacaaggtctcactctgtcactcaggctggagtgtggtggcacaaacgtgactcacttcagcctcgacctctagggttcaggtgatcctcccacctcagcctcctgagtagttgggactacaggcatttgttactgacctgggcaaattttatttatttagtttttgttttctttgggtttgtttgtttgttttagacagagtcttgctctgtcgcccagagtgcagtagtgcaatctcggctcactgcaaactccacctcctaggttcaagtgattctcctgcctcagcctcctaagtagctgggattacaggcttgcaccaccaagaccagctaatttttgtatttttagtagaaacagggtttcaccctgttcgccaggctggtctcaaactcctgacctccagtgatccacccgccttggcctcccaaagtgttaggatacagacgtgagccaccacgcctggccattttctttttttttgagacagagtctccatctgtcacccaggctggagtgcggtggcacaatctcagctcactgcaacctctgccacctgggttcaagcgattctcatgcctcaacctcccaggtagctggaattacatgggtgccaccacacccagctaatttttgtatttttagttgagatgggatttcaccatgttggccaggctggtctcgaactcctgacctcaagtgatctgcctgcctcccaaagtgctgggattataaggatgaaccactgcacccggcctaattttgtagagatgtggtcttgcccatgttgcctaggctggtcttgaactcctgggctcaagtgatcctccaccctcaacctctcaaagtgttgagatttttgttgttgctgttttgtttttgtttttgagactgggtatggctctgtcactcaggctggagtccagtggcatgatctcggctcactgcaacctccacttcctgggatcaagcgattctcatgcctcagcctccccagtagctgggcctagaggagcatgccattgcgtgctggctttttttgtattgtttgtagagacgagactttgctttcctatgttggccaggctgctcttgaactcctgggctcaagcaatttgccggcctcccaaaatccaaaatgctgggattacaggcgtgagcttttttttttttttttttttttggagatggagttttgctcttgttgcccaggctggagtgcagtggcatgatcttgactcactgcaacctccatctcccaggttcaagcgattctcctgcctcagcctcctgagtagctgggattacaggcgcctgccaccacgcctggctaattttgtatttttagtagagatggggttttgctgtgttggtcaggctgctcttgaactcctgacctcagatgatcgacccgcctcggcctcccaaactgctgggatcacaggcataagccactgagcccggccaggcatgagcttttgtagggcataccagattgaaaatgaagactgtcaggccaggcgtggtggctcacgcctgtaatctcagcactttgggaggcaaggtgggtggatcacgaggtcaggagatcgagaccatcctggctaacacggtgaaaccccgtctctactaaaaatacaaaaacttagccgggcgtggtggcgggggcctgtagtcccagctgttcaggaggctgaggcaggagaatggtgagaacccaagaggcaaagcttgcagtgagccaagatctcaccactgccctccagcctgggtgacagagcgagactctgtctcaaaaaaaataaaaagaaaaagaaaagactgtgggctgggcgcggtggctcacacctgtaatcccagcactttggggggccgaggcagtcggactacctgaggtcaggaatttgagaccagcctggccaacaaggtgaaaccccgtctctactaaaaatacgaaaattagccgcatgtggtagcaggcgcctgtaatcccagctactcgggagtctgaggcaggagaatcacttgaacccgggaggcggatgttgcagtgagccaagatcaaacctttgcactccttgcactctggcctgaggacaacagcaagacttgatctcaaaaaaaaaaaaaaagactttggactgggtgcagtggctcacaccagtaatcccagcacttttcgaggccgaggcggacggatcacgagatcaggagttggagaccagcctggccagtatggtgaaacaccgtctctactaaaaattagccgggcatggtggtgcgcacccgtagtcccagctactcgggaggctgaggcaggataattgcttgaacccgtgaggcagaggttgcagtgagcggagttcgcaccactgcactccagcgtgcgcgacagagactctgtctcaaaaaaaaaaaaaaaaagaaataaaagaaagacccaacaccacatcaggacatgtaattcttatttatttttcaccctcaacaaggaagaaaggtctctccctcaattctgctcttccaatacttgaggataggcacccctaaccctccttcctccagggaggcctcagcatcagtgtctgtggacgtagtctctgaagagtgcttcagctgatggggaaggagaaactcaagacagagatcctcctagggatggcgtcactttcctgccaactttctcgttgcctctccttgaaagcagaagaagtgccagccctcagcttccgtcagatcttgggctcctagggccttgtacaagtccatggccctctggttccagtccaggacggccaggcggaattgggagcagcccttatccaaggccacctgtgggagaagacaacactaacttttctggggtcaaaaaagaaaaaggttttctcactccctctttcaacccgggtcccccctccatatacccttgcttcttcaggtcctcacttgtcgccccacccatctcctcacctcagccacctttttgattattttggaaccaatcccttgacctgttgtggagagaaagaggcaaaaaatagctattgtttgagctgaaggggatcagaaaatgacaccggctgggctctggggacaggggataacagtggggtctgtggggtgctttgctcccaccccagcctcagcttctgcccagtaccccgatattccggcatcacatagatatcctccagataaatggtgcgtcccttccatgtactgtagatgaaatagtatatcccatagcccaccacgcagggccctgagagagagaaaaggggagtaaggcttctggaagcctgtggggagacctctgaggccggctggagaggtggacttctaagggccaggtgctcttacccagtagcttcccgggcgctggaagaatctctgctaccaaacagtgatagaaaggattgtctccaaagccatctgctctcagggctgccgagattggagttgtgacaaagagatagagaaagaggacgtgggtgtatgcccagcctggagctgtcgcctggggaacccatccctcatttcctccccagcctccgccagaacctgggcgctgagcccccaccttcttcactgatcttcacctgatccgagagtttttcgaattcggctagctcctaaggcgtgggtacggaagctagattagagcagaagggccccgctgctccccgagcaggttcccaaggcgagcccctccccctgcccccgcctcctacgaccccgctctggccgcgccactctgacccccgggttaccggcctgcagtcttcacccgaatcagcctcaggatatctccacagtctccctccttggcctctcggatccgcacggaagccatccggatccccgctgtctgggaccaaagtcccagggcctcgcaaacggcaactagaccccttaaagggcctacggacttggatcctgaagagcctgagagagcggggtggcgggagtcgggggggacggcggggtagccgcggcctggtaagtggagctgggattccggcgccgtacgggaggagagagtaggccagcgaggcgatcctctgtccgggcatagccccaccccctcgaattctgtcgcagcagggggcacaactgtcagccaatcagcttggagaacaggcacggccgcgtcccccccaagccccacccccgacagctggatcttgtgactgggctcctgggtagagttcaaggttggagtgaagcggcttccttgcggttgtgtgggtgtcccaacctgggtcgagataccccgcggttcaaaggctcccccgcagtgctttttaaattgacatatgcagtgataacctgctttagcctcaggctcactcacccgcccagaccctgggtaagccttaagaccctcagctctgaaagctgtttcctgcagctcttgagtagcatgaagtgttacctcttgggggcatttgcattttttaaatgttttatttttatatttatttatttatttatttttggagatggtgtattgctttgtcgcccaggctggggtgtagtggcgcgatctctgctcactgcagcctccacctcccgagttcaagcgatcctcctgtctcagcctccggagtagctggaactacagtcgcgcaccggcacgcccggctaatttttttttcttttttcttctctttttttttgttttaacggattctcactctgtcactcaggctggagtgcagtggcgcgatctcggctcactgcaacctctccctcctgggttcaagcgattctcctgcctcaccctcggagtagctgggattacaggcatgggcaaccatacctggctaatttttgtatttttagtagagacggggtttcactatgttggccaggctggtctggaactcctgacctcaagtgatctgcccgcctcagccttctaaagtgctgggattacagatgtgacccaccaagcccggtctgtcatttgcattttaaaatgggtcatggggtgggcacagtggctcacacctgtaatcccagcattttgggaggcagaggcaggcggatcacctgagatcaggaatttgagaccagcctgaccaacatggtgaaaccccgtctctactaaaaatacaaaaattagacaggtgtggtggcgcatgcctttactcccagctactcgggaggctgagacaggagaatcgcttgaacctgggaggtggaggttacagtgagccgagatcgtgccattgcactccagcctgggcaacaaaagcgaaactccatctcaaaataaataaataaaataaaatgcgtcagggagggtcgggccttgtggctaatgcctgtaatccaggtactttgggaggctgaggtgggcggatcatttcaggtcagaggttcgagatcagcctgggcaacgtggtgaaatccccgtctctactaaaaacacaaaaaaatttgctgggcgtggtggtgcgtgcacctgtagtcccaactactaaggaggctgagacaggaggatcgcttgaactcgagaggcagaggcagcagtgagccgagatcacgccactgcactccagcctgggtgatagagcaagactctgtctaaaataaaataaaataaaataaaataaaataaaataaaatgggtcagggagtgggtgatttctactgctagactgtttaggccctgtaataaatggataagggaagataactgagaggcggggggcaggtcccttcttaatattcactgaatcatacacacagacaataccttcttgggagacaggcctcagaggcctgggaaaagactgggggaggagttcagaccagatgccaggcactgtgcctgcattttctcaatgaaccctctttcacagtcaccccgtaaagtattattttcctcattttacagacaaggacactgaagcacagaggtgaagtgacttgcccaaggtcactcagctagaaatttaggattccattatctcatttctagtcctgatacaggatgctacttgggacgcaggggaggactgtttctagacctcaggcctgtgaatgcaggctccccgagtggacagaaatcttggaggacctagatcaggccctagaggaggagaggggagatggaatatcctctcccagttcagaaactttctcggcagtggaggatgatagtggaggggactctgtccttcaccccattgatccccagaggggtgatagctgagtcttgtgactgggcccctgggcaggggtcaagggtcagtgcccctgtttcctttaccccctcctccccgggcaacctttaaccctccaccgcccacacgcaaggctgcctgcctctacacattctcccaagagttgtctgagccgccgagtggacagtggctgattatggagagcagaggcccactggctacctcgcgcctgctgctgttgctgctgttgctactactgcgtcacacccgccagggatgggccctgagacctgttctccccacccaggtgcaggagcgggacagggcactcagctcatgcagtcttcccttctctcctctggccctgtagcagggcctctccctctgtctgtctctgacatgtccctactcagctttgtttgttttctctttctgatagagtgcccacgaccctccggctgtccacctcagcaatggcccaggacaagagcctatcgctgtcatgacctttgacctcaccaagatcacaaagtatggggttggcctagcccttgacccagtcccctggttctgccctctctccatcagctcttctcttttccctgtcttcctttccttatctgtgaacaccatctcccccaaacccacactggttctcaaaggacacatgacatacacaatctttccttctgtgtccttccagaacctcctcctcctttgaggttcgaacctgggacccagagggagtgattttttatggggataccaaccctaaggatgactggtttatgctgggacttcgagacggcaggcctgagatccaactgcacaatcactgggcccagcttacggtgggtgctggaccacggctggatgatgggagatggcaccaggtaagctagctctggtcctcaggggagggatgtctggagctggtctgaggaaagggaacaaaaccaagttattgggcatccctctaccactgtcatctcgtttaatccacacgaacccccacaaagtagctattcttggccccatcttttctgatgggaattctaaggctcagtcagtatataagtgacaagagctgagtgacccaaggccaaggatgctagctgcttctttaaggcatgttctttccactatagtactaggctgcctcacaggaaggtggcagaaacagatcccaggggcctctgattttgcttcccaccttcctgcaggtggaagtcaagatggagggggactctgtgctgctggaggtggatggggaggaggtgctgcgcctgagacaggtctctgggcccctgaccagcaaacgccatcccatcatgaggattgcgcttggggggctgctcttccccgcttccaaccttcggttgccggtaactacaccccaggggtggaaccctagccaagacttggtaaagcactgctgggtggctggccgtgggaatctaagtccacacttttagggagaagggaagggttgagagctgcaagggggaggccaaatgctcagaggggagtcaactgagggcagggaggtcgggactgcggctccgatgccctgatttctacatccccgtatcttatctctgtcacactccagctggttcctgccctggatggctgcctgcgccgggattcctggctggacaaacaggccgagatctcagcatctgcccccactagcctcagaagctgtgatgtagaatcaaatcccgggatatttctccctccagggactcaggcagaattcaatctccgaggtagatttcctcggagtctatttttcccaccctggccagctcagcctgcctctgtccccctctaccactggcccctttcctccttgagaccccagctttgaggcctcaggataatcatttctccccacagacattccccagcctcatgcagagccctgggccttctctttggacctgggactcaagcaggcagcaggctcaggccacctccttgctcttgggacaccagagaacccatcttggctcagtctccacctccaagatcaagtaaagggggacagtggggcattgcctgtattcagtggagcctggagcaatgagggaagaggggagtccaacatgtcaatattaggaaggtttccagcccagggaacataacaagactggctccacagaattgtttttcattaataattagccaggcatggtggtgcttgcctgtaatcccaggtgctggaggccaagaccagaggatcacttgaggccaggagtttgacaccagcctgggcaacatagcagagacctctgtctaaaaaaaaaaaaaaattagccaggcatggtagcacatgtctgctgccctagctatttaggagcctgaggcaggaggttcacttgagcccaggagtttgaagctgcagtgagctatgatgtgccactgcactctgacctgggccacagtgagaccctgtctcaaaaaaataaaaataaaaataaggcttatggatggcactcaggtgggtggtaggggcgagggacatatcttgaagctccccacagcaagcaaacagttttgacttagactgcatatttacttggggcaggtgtggtttcaaaaagggtcaagccaaaaaaaattggggcaggatttaagtggtgagaatggccagtaggtggaggcatagcgaagaggcagaattaaggcagctaggggtgaggccacaggcagtaggcccggctcattcttccctctctctctaccgtccctttcccacacactctgcagaaggtggtgttgtcttctgggtcggggccagggctggatctgcccctggtcttgggactccctcttcagctgaagctgagtatgtccagggtggtcttgagccaagggtcgaagatgaaggcccttgccctgcctcccttaggcctggctcccctccttaacctctgggccaagcctcaagggcgtctcttcctgggggctttaccaggtaagagagaatgatgttcaagttcatgagcacaacattggaaacagctcaagggaggcggcacattttgaggggaaggaaacctctgggagggaagaagaataggccacaagaagaagatatgggggcagtggaaggtagtgcttttgcaaactcaggttggaggagtggaaaagtggggagaagattctggatccgagccaccttaatgctctaatgccacctttgcactacctccctctaggagaagactcttccacctctttttgcctgaatggcctttgggcacaaggtcagaggctggatgtggaccaggccctgaacagaagccatgagatctggactcacagctgcccccagagcccaggcaatggcactgacgcttcccattaaagctccacctaagaaccccctttgaaagttactgattattcatttattcaacaaatattcactgtgcactagcaatgtaccaggcactgtgccaagtattgagttgtcttaatgagcaaaaacactctggttcctaccctcttggtgcccacagtcccatagggaagcagacatccatcaaaggctaactaataagtggatagttggaagcactgataaagaagaattggagagttgtgaaaacatggagactggccgggcgtggtggctcacgcctgtaatcccagcactttgggaggcagaggcgggcggaccacaaggtcaggagatcgagaccatcctggctaacacggtgaaaccccgtctctactgaaaatacaaaaaaattagctgggcatggtggcgggcgcctgtagtcccggctgctcgagaggctgaggcaggagaatggtgtgaacccgggaggcggagcttgcagtgagccgagatcgcgccactacactccagcctgggcaacagagcaagagtccatctcaaaaaaaaagaaaaaagaaaaaatagaaaacatggagactaggaggccttaacttagtctgagcgtcaaggagagtttctctaaggaaatgaggacttctttttttttttttttttgagatggagtttcccgctcttgttgcccaggctggagtgcaatggcgtgatctcggctcactgcaacctccgcctcgcgggttcaagcgattcttttgcctcagcctcccgagtagctgggattacaggcgtgcaccaccacccccagctaattttttgtatttttagtagaggtggggtttcaccatgttggccaggctggtctagaactcctgacctcgggtgatcctcctgcctcggcctcccaaagtgctgggattacaggcgtgagccattgcgtccggctggaaatgaggacttcttaggctgagatcccagcaaaaaccccgacagacagacatactctggatacaggtcactttctggaagccaggacccacctggttccgcagaagctactccctttgagaccagtttcctgcctctgtggctggtccagagagatcaggaggaagggaagagatgggattttgacatctcagtcatctggtccttggactggccattgctgcccagggaagaagcagcagggggcgtgagagggtcacagagagatgtgggtaggggttctggaaaaaggggtggaggcagggagaaagaaaaagggaggagagcagagggagaaagtcgcgtctctctctctctctcctagtcttggtccacttgctgccttcccagacaaatttgtctctactccattaagcaagaactggcttgtgctggtcccagctgggaaaaacagacagatttgggaatatctctcccctcaaagaatacggtgacccagctctcaaccacagacctctagagaatgctggtgcccagcatccctccctggggaaccctcgtatccaagcccatagcccctacccctcagctcccagtcttctgccctcttaggaacccttgtgtcctagcccaaagctcccagcctactaaggagccctggggctaaagccccccatcctctttcctctcaagaactattaggtcagccaggtgtggtagctcacacctttaatcccagcactttgggaggccggggtgggcggatcacctgaagtcaggagtttgagaccaatctggccaacatagtgcaatcccgtctctactaaaaatacaaaaattagctgggcatgatggtgggcgcctgtaatcccagctactcgggaggctgaggcaggagaattgcttgaacctgggaggtggaggttgcagtgagccgagattgcgccactgcactccaacctgggtgacagagtgagactctgtctcaaaaaaacaaaacaaaacaaaaaaaaacttaaaaagaaccattaggttaaagcatcctccatctccagaccccatgagaatcccagtgtccaagactcctaatttcttacaagaatcttttcaccagtaacccaggcagcaggctgagtcactcactggagctgctgtccccttctgcagagatcagccgggacctaaatgactccagggtaaggaggccctggggagtctgtagggtagaagacacaaatcccaagccccaccttctacctctcctaatcttgaccctatagaccctctcaggatctacaactgcctccacccagccagcagtgttggtagtggagtcttcagcaatggagagggcatccacatttaactctggccccttgttgacgttcagggctaacctaggccacctgagcacccgctatgtactaggcactgttgtagatactgaggattcgttggtgaaaaggacaaaaacaggctgggcgcagtggctcacgcctgtaatctcagcactttgggaggctgagacgggcggatcatgaggtcaggagatcaagaccatcctagccgggcgtggtggcggcgcctgtagtctcagctacttgggaggctgaggcaggagaatggcgtgaacccgggaggtggagcttgcagtgagcggagatcgcaccactgcactccagcctgggcgacagagcgagactccgtctcaaaaaaaaaagaaagaaagaaaaaagaaaaggacaaacactatccccgctctgatggaacttatagcatagtagaggggaagcagacacaaacaagaacacaaataaataagcaggattatttcagatagcggttagagcaataaagggaacaaaaccctgtaatataataggagggggaggggagggtcaacattagctgggtggtcagggaagtcatttgagcagagacctgaataatgaaaagaagtcatcctgtggaggcctgtggagtgtgagccagcagggaggggggttaaagagcccggatgtacctgggcacccaccaagggggttgttccgagtgccaatatcctgaccttttgtccctggaatctcctcggagctggcttttctctcctccctccaccccaccttctccaggacactgtgccaccaacctctctttccccagcctgccctagattccaggattcctgattaccatccagagctgtctacactctttcattaagactgacttcgctttgacatcgactttgccaggtccccaaccaagggcacctacgatgcctgcccagtgtcccctgccttccccacacccccaaaaacttttcagagcttggcagcacacactaaagcctctgggcctgatctacccactcaccccatcctacccactgcctctctctctctctctccctcccttcttgctgcgccccccccccaactttcattcaattaacatgtattggctgctgatacattggtcaaatactgtgtagcccaccacagggactctaaagatgaatataaaacttggtactgggctggagaaccagggtctttttttttttttgagacggagtctcgctttttctcccaggctggaatgcagtggcgtgatcttggctcactgcaagctctacctcctgggttcacgccattctcctgcctcagccttctgagtagctgggactacaggcgtacgccaccacgcccagataattttttgtttttttagtagagacggggtttcaccgtgttagccaggatggtctccatctcctgacctcgtgatccacccgcttcggcctcccaaagtgctgggattacaggcgtgagccactgtgcctggcctttttttttcttttgagacagagtctcgctctttcagccaggctggagtgcagtgacatgatctcagctcactgaaacctctgtctcccaggctcaagcaattctcctgtctcagcttcccaagtagctgggactacaggcatgtgccaccacacctggctaatttttgtacttttagtagagatggggattcaccatgttggccaggctagtctcgaactcctgacctcaggtaatctgcctgtctcggcctcccagagtgctgggattataggcatgagccaccgcgcccagcctttttttttttttttcttttgagacagagtctccctctattgcccaggctggagtgcaatggcgtgaccttggctcactgcaacttccacttcccgggttcaagtgattctcctgcctcagcctctcaagtaactgggattacaggcatgcaccaccacacctggctaatttttatatttttagtagagacaaagtttcaccatgttggccaggctggtctcaaactcctgacctcaggtgatctgcccacctcagcctcccaaagtgctgagtttaagggcgtgagccaccgggcccagccagaaccagggtcttgagagagagatagacatgtaaaatgctttagcagaggtatctgagatgccaagaaacctagttgctagttctactaaggaccatcaaagaaatgagttatggctggacgcggtggctcatgcctgtaatcccagcactttgggaggctaaggtgaatggatcacctgaaatcaggagtttaagaccggcgtggccagcatggtgaaaccccatctctactaaaaatacaaaaaattagctgggcgtggtggcgggctcccataatcccagctactggggaggctgaggcaggagaatcgcttgaacccgggaggcggagggtgcagtgagctgagactgcaccattgcactccagcctgggcaacagagcaagacttcggaacaagaaaacaaaaaaataaaaaaacaaaagaaacgagttgttagatgtgcgaagttgaacaaatgactaaacctctattactgtttccccatctacaaaatgggaagtttctctatcttagaaggttactgtgaagatttgatgaaatcatgtagacattttaatgtctagcatagtgtttggcatacagaaagtgctcaatatatgagatatatatatatttctcaatatatataagaaatgttgttcttattaatctcacacagttcctgacatattagttctcacatagttcctgacatactagtctgagcctgctgggtatcaaagatctgggagggcgtgtgacatggatgaaccatggagaggctgagatggagtgagggcaggtgggggctccttgggctatgtggccttgtgtgtcctgctgaggagttggagcttgatctcgtcagtgaataaactttattttcttatctattcttctttttcttcttcttcttttttttttttttgagagagagtctcactgtgtcgcccaggctggaatgcagtggcgtgatctgggctcactgcaacctctgtctcccgggtttaagagattctcctggctcagcctcccaagtagctgggattacagatgcccaccaccacgcccagctaattttttgtatttttagtagagacggggtttcactgtgttagccaggatggtctcaatcttctgaccttgtgatctgcccacctcggtctcccaaagtgctgggattacaggcgtgagccaccatgtcaggcctttttttttttttttttgagacagcatctggttctgttgcccaggctgaagtgtagtggcgcgatttcagttcactgcaacctccagctcctgggttcaagcgattctcctgcctcagcttcctgagtagctgggattacagacatgcaccaccacacctgactaattttttgtatttttagtagagacagggttttaccatttggccaggctggtctcaaacttctggcctcaagtgatccacacaccttggcctcccaaagtgctgggattacaagcgtgagccaccacatctggctttctttcttccttttcttctatttttttcttttttagagacagccttgctgtgttaccaactgtagtacagtggtgcaatcatggctgggaccacaggagcaggccattgcacccagcttatttttaaattttttgtagagatgcggtcttgctatgttactcaggctgatctcaaactcttggccccactcttggaatcctccccactcagcctcccaaagtgctgggattacaggcatgagccaccattcctggcctcttctcttattttctttttctttctttccttcccttccttccttctttcgattgtggtaaaatacacacaacataaaatttaccatctgaaccttttttttgtttttgagataggatctcattctgttgcccaggctggagtacattggtgcaaccatggctcactgtagcctccagttcctgggttcaagtaatcttctcacctcagcccccccagtagctgggactacaggcatgcaccactaagcctggctaattttttttttttttttttttgagactgagtcttgctgtcgcccgggctagagtgcagtggtgcgatcaatgctcaccgcaacctctgcctcctgggttcaagcaattctcctgtctcagcctcccgagtagctgggattacaggcctgataatttttgtatttttagtggagacggggtttcaccatgttggccaggctggtctcaaactcctgacctcaggtgatccacccacctcggcctcccaaagtgctgtgattacaggcgtgagccaccgtgcccagctaatttttgtatttttagtagaaatggggtttcaccatgttggccaggctggtctcgaactccagacctcaagtgatccacccacctcagcctcccaaagtgctgggattacaggtgtgagctgctgcacccggcctaatttttaaattttttgtatagactggggtcccactggtctggaactcctgggcttgaatgattctcccaccttggtctctcaaagtgccgggattacaggtgtgagctaccgcgcctggaccatcttaacctttttttttttttttttgagatggagtcttgctctgtcgcccaggctggaccgcagtggcacgaccttggctcactgcaacctctgtctcccaggttcaagcaattctcccgtctcagcctcctgtcatcttaaccatttttaagtgtacatttcagtggcattaactccactcacgatgttgtgcaaccatcaccaccatccatttccagaactcttttcatctttgtaaaactgagactctgtccccattaaacagcactgttccattcccctctccccacatatctgtgtttcagaagtcttctctttccttgttcttgtctttgcaaacacccattttgttgggaacccagacggctaagtccctggaattgcacggactgacgggaaggagatagacgggtacagccctcagtgagaggtgacagcgtgctggcagccctcacagccctcgctcgctctcagcaccttctcggtcttggcgcccactctggccgcgcttgaggagcccttcagcccaccgctgcactgtgggagcccctttctgggctggccaaggtcggagccagctccttcagcttgcgggaaggtgtggagggagagacgcgggtgggaaccggggctgcacgcggtgcttgccggccagcgcgattttgggtggacgtggcacttggagcgccggccggccctgccggccccgggcagtgaggggattagcaccagggccagcagctgctatgctcaattctcgccgggccttagctgccttgccgcagggcagtgctcgggacctgcagcccaccatgcctgagcctccccttcactccgtgggctcctgtgcagcccgagtctccctgaggagcgccaccccctgctccatggcgcccagtcccatcgaccacccaagagctgaggagtgcaggtgcatggcactggactggcaggcagctccacctgcggcctggtgctggatccactgggtgaagccagttgggcttctgagtctggtggggacttggagaacctttatgtctagctaagggattgtaaatacaccaatcggcactgtgtgtctagctcaaggtttgtaaacacaccaatcagcacccagtgtctagctcagggtttatgaatgcaccaatcaacactctgtatctagctactctggtggggacttggagaacatttatgtctagctaagggattgtaaatacaccaatcggcattctgtgtctagctcaaggtttgtaaacacaccaatcagcacctggtgtctagctcagggtttgtgaatgcaccaatcgacactgtatctaactactctggtggggacttggagaacctttgtgttgacactctgtatctagctaatctactggggacttggagaacttttgtgtctagctcagggattgtaaacgcaccaatcagcaccctgtcaaaatggaccaatcagctctctgtaaaatggaccaatcggctctctgtaaaatggaccagtcagcaggatgtgggtgggaccagataagagaataaacgcaggctgcccgagccagcagtggcaactcactgggtcccgtttcatactgtggaagcttagttctttcgctctttgcaataaatcttgctgctgctcactctttgggtccacacttcttttatgagctgtaacactcactctgaaggtctgcagcttcactcctgaagccagcgagaccatgaacccactggcaggaacgatgaactccagacaagccgccttaagagctgtgacattcacggggaaggtctgcagcttcactcctgagccagcgagaccacgaacccaccagaaggaaataactccgaacacatccgaacatcagaaggaacaaactctggacacgccgccttttaagaactgtgacactcaactgcgagggtctgtggcttcattcttgaagttagtgagaccaaaaactcaccaattccggacacaccaggacaaggtctagatatgaaagagggggtgtgaaggctttcatgccctggtttctttctggagatgctggtgggaaaggtgggctccaggaaaaggctggaggtttgtaacagctcttctcctggaaatttttcagatctcccctctctcagcgtgtttccctcagaacaccaatgttgcgcttaatgctggggctcctcccccctcctccgttctctcctccaaacttgcaggagaagacagcaaggaaagggagcaacaggtatctcatccttactccataaaccccctacagtgcagagaagacatttctttctttccaagtgaacatggggtacaagggtagagactgagccgggaatccggaggccacccctggctgtgtttgctaagctttacgttttgaggataggaccaggtttcatctttacaaacagaggctgtatcacttccgtgctgcttgcctgaggaaggaaagagcaagttgcctctgaggtcccttgcagaaggagcctttccatgttcatgccaatttaaccaggcactatctttggtagctctatgggtttcttgagtttgaagaaagtataaatagtctaagataaaggcctgttctcaaagagcttagagcgcttagagtctagttgaagagataaaacacacacaagagttttcttttttttgagacggagtctcgctctgtcacccacgctggagtgcaatggtgcgatctcgactcactgcaacctccacctccagggttcaggtgattctcctgccttggcctcttgagtagctgggattacaggcacccggctaatcttttttgtatatttagtagagacagggtttcaccacgttgaccaagctggtcttgaacttctttttatttatttatttttattttttgagacggaatttcgctctttttgcccatgctggagtgtaatggcgctatctcggctcaccgcaacctctgcctcccgggttcaagcgattgtcctgcctcagcctcccgagtagctgggattacaggcatgcgccaccaccccagctgattttgtatttttagtacagacggggtgtctccacgttggtcaggctggtcttgaactcccgacctcaagtgatccacctgcctcagcctcccaaagtgctgggattacaggtgtgagccaccgcgcccggcaggctggtcttgacgttctgatttcaggtgatccacccgcctcggtttcccaaagtgctgggattacaggagtgaaccaccgcgcccggcccaattttttttttttttttttgagaggaagtcttattctgttgcccaggctggagtgcagtggtgcgatctcggctcactgcaagctctgcctcccgggtttcctgcctcagcctccggagtagctgggactacaggcacccaccaccgcgcccagctaattttttgtatttttagtagtgacggggtttcgctgtgttctcgatctcctgacctcgtgatccgcctgcctcggcctcccaaagtgctgggattacaggcgtgagccaccgcgcccagcccttttttttttttttcagacggagtttcactcttgttgcccaggctggagtgcaatggcacaatctcagctcactgcaacctctgcctcccgggttcaagtgattctcctgtctcagcctccctagtagctgggattacaggcatgtgccaccatgcccggctagttttgtacttttagtagagacggggtttctccatgttggtcaggctggtctcgaactcccgaccgcaggtgatccaccctcctcggcttcccatagtgctgggattataggcataagccaccgcgcctggtcttttttttttctttttgagacagtctcgcagtgttgccaaggctggagtgtaaagggcgcaatctcggctcactgcaacctctgcctcctgagttcaagtgattctcctatcttagcctcccgagtagctgggattacaagtgcccaccaccatgcctggctaatgttttgtatttttagtagagatggggtttcactgtgttggtcaggctggtcttgaactcccgcctcggcctcccaaagtgctgggatcacagacgtgagcaactgcacccggctgcacagctagttttgtatttttagtagagacagggtttcacatgttggccaggctggtctggaactcctaacctcaagtgatccgcccgcctaggcctcccaaagtgctgggattacaggcgtgataatttttgtatttttaatagagatggggtttcgccatgttggccagtctagtcttgaactcctgacctcaaatgatctgcccgcctggccctcccaaagtgctggtattataggcatgagcccccgggcccggccaattttcattaaatgtgattatgtcactctccctcctgaaaccacagaattgtttttttggtggttggattaaaatccaaaccacatccactagatgagataggaggtcaaaaatatccagccattctctagggtctacaaggaccctttatggtttggcccctgcctaggtcttcaatctcttgctgtattcatcttgtctttgctcattaaagcccagcctttgcactttcacttccttcttcctggaaatctcttcccttacctctcctcagacctccttttgggtgtgtgagtcttacatgaacagtcatttccgtcacaagagttcaaggctgcagtaagccacagttgcaccaccgtactccagcctgggcagcagacagagattgtctcaaaaaaaaaaaaagttgtggctggatgcggtggctcatgcctgtaatcccagcactatggaaggctgaggcaggtggatcacctgaggtcaggagttcgagaccagcctgaccaatatggtgaaaaaccgtctctactaaaatacaaaaattagctgggcatggtggcgcatgcctgtgatcccagccacttgggaggctgaggcaggagaagcacttgaacccaggaggcgaaggttggagtgagccgagatcatgccattgcagtccagcctggacgacaagagactccgtataaaaaacaaaacaaaacaaaaaagttgctttctcagtaaggccattcctgaccatccaggcactctctggtaccttagcctgttctttttcctgcataatattaacattattaggctgggtgcggtggctcatacctgtaatcccagcactttgggaggccgaggcaggcagatcacttgaggtcatgagttggagaccagcctggccaacatggtgaaactggtctctactaaaacacaaaaattagctaggcatggtggtgcatgcctgtaatcccggttactcggggggctgaggcaggaaaattgcttgaacccgggagatgaggttgcagtgagccaagattgtaccactgccctctagcctgggcgatagaacaagactctatctcaaaataataataataataataataataataataataataataatataaacattgtatttgtttgcttttgttaattgtctactggagtggcagccccaggaacacagggaccagaatagtaatagcacctgactctaagcaaatgctcattagatatgcattgagtgggccaggcatggtggctcatgtctacaatcccagcactttgggaggccaaggtgggtgggtcacctgaggtcaagagttaaaatcagcctggccaatatggtgaaattgcgtctctactaaaactacaaaaattagccgggtgcagtggtgggagcctgtaatcccagctactcaggaggctgaggcaggagaatcgcttgaacccaggaggcggaggttgcagtaagccaagatcatgccattgtgctccagcctgggcaacagagcgagattctgtctcaagaaaaaaaaaaagaatcattatctccacctcttttaatctttcttcaaatcttgccggttttccttggagaggtttttcttctcctttcaactgtcaccttaaatccttagcccagtttctcaacacctcacatccaaactgccgtccacatcctcaaacccactccctccagtccaaggccagcctcctgacgtgcgacctgcacagtggcgcaaggcccatgctcatagttgtttggtttaaaactctgctgttgcttttttttccccccaaacattcatggagctgaatgccatcgctgtcttgaaattcttcatagttctatctttgaatttgtgctttgtaagtaacatccagtggagcactggcgcatgcgtgtgagcagaggagatacgtcccattcacacagcgttccagatgcaacatggacacagaattctggggaacctacaacgtgtgggagttcagccagactccagatgagtataaggtaagcacattatgtctgcaactgaatatgtgaggctgagcccggccagctgctgaattggacgtgaacatggaaaagctccctctgcaaggaacctcaacaacaatggctcctgcctgtaattccagcactttgagtgacccaggcgggaggatcccttgagcccaggagttcaacacaagccttggcaatatggcgagaccccatctctatgaaaaacttctttaaaaattagccaggcattttagccaggtggactagtagacaggcatttagcccggtgagactagtagccactgggctactcccagctacttaggaggctgagctgggaggattggatcaccatgatcacgccactgcactccagcctaggtgacagaataagagactatctcaaaaaaaaaaaaaaaaaaaaagagtaagtgggagtgctgacagctgagagaccacactctccactggaagcagaacttggctatgaacgtggaaaggaagcaatggcattgtaggaggcatggatgatcaccataccttaccagatcttttcttagtcatgtccctgttttggccacttacgctggcaacaatgacatagaaggaaagggaaggctgaggcaacccatagttccttttcctttcagtccttccttccttatcaggaagctgaagatagaaaaatgttaggcggggctcacacctgcaatcctagcactttgggaggccaagatggcaggattgcttgaggccaggagtttgagaccagcctcgtcaacacagagacctccatctttgttttttaagagaccccccatctctaaaaaagaaagagaaagagaccgggtgcggtggctcacgcctgtaatcccagcattttgggaggccgaggtgggcggatcacgaggtcaggagttccagaccagactgaccaacatggtgaaatcccatctctactaaaaatacaaaaattagccaggcgtggttgtgcacgcctgtaatcccagctactcaggaggctgaggcaggagaatcgcttgaacccgggaggtggaagttgcagcgagccaagatcgcgccattgcactccagcctgggcgacagagtgagactccgtctcaaaaaaagaaaaaaaaaacatgtaaacattaaatagcaaagaaaaaaacaccatgagaaagccaggtgtggtgatgtgtgcctgcagccccaactacctggaggctgagactggaaggtcgttcatggacatgctgggtacggtggctcacacttgtgatttcagcactttgggaggctgatgtgggtggatcccttgagtccaggagtccaggagttccacaccagcctggccaacacggcaaaaccctgtctctagtaaaaatacaaaaattagccgggcatggtggcctgtgcctgtaatcccagctactcaagaggctgagacagaagaattgcttgaacctgggaagtggaggttgcagtgagccaagatcgcgtcactgcactccagtctgggtgacatagcaagaccctgtctctaaaacaaaaaaccatgagaagctgaaagaactatggatgaaaggaaaatagtttaggctgggtgcggttgttcacacctgtaatcccagcactttgcgaggccaaggtaggtggatcatttgaggtcaggaactcaaaactagcctggccaacatggtgaaatcccatctctacaaaaaaatacagaaattagccgggcgtggtggtagtcccagctacccgggagactgagggaggaaccgcttgaaccctggaggcagaggctgcagtgagcagatatcatgccactgcactccagcctgggtgacacagtgagactctgtctccaaaaaaaaaaaaaaaaaaaaaaaaaaaaaaagtttatattttagtgcctctaagggcattttttcccctaggttttgaacaagggtccctgcatttccattttgcactggatcctgacaattatgcagctggccatgcttcagtctattctgcagcagattcgggattaattttctcaaaatacagctttaattaggccactcctcagctgaaagttcttcagtggcttcttattagcctgtaggatagagtcctgattcttcagtctaacctgcagggtactccgcaatccacacccatgctgtgtccccaacctcctttcccactagtctccgactagttctctcctggagccaagccagccactcctggggtagactgtgcttactcctgacttcacacctctgtgcctttcattcctttgtcctggaagactacctacccttcagaggccagccccaactcccattcattcattcattcattcaatgcataccatttttttgagatggagttttgctcttgtccaggctggagtgcagtgacacaatctcggctcactgcaacctccaccttccaggttcaagcaattctcttgcctcagcctcctgagtagctgggattacaggctcccaccaccgcacccggctaatttttttagttttagtagagacgcagtttcaccatgttggccaggctggtcttgaactcctgacctctggtctcgaactcccttgctcaggtgatccattggcctcggcctcctatagagctgggattacaggcatgagccactgggcctggccgagataatgattttttttttctctctttttttgagacgaagtctcactctattgcccaagctggagtgcaatggcgtgatctcagctcactgcaagctccgcctcccgggttcaagcaattctcctgcttcagcctcctgagtagctgggactacaggcacccaccaccatgcccagctaatttttttttttttttttattgagacggaagctctgttgcccaggctggagtgcagtggagcgatctcggctcactgcaagctccgcctcccgggttcatgccattctcctgcctcagcctcccaagtagctgggactacaagctcccgccacgacgcccagctaattttttttttttgtatttttagtagggacggggtttcactgtgttatccaggatggtctcgatctcctgacctcgtgatccacccacctcggcctcccaaagtgctgggattactggcgtgagccaccgcgcctggcctaattttgcatttttaagtagagacggggtttcaccatgtgggcaaggctagtctcgaactcctgacttcgtgatctgcccgcctcggcctcccaaaatgctgggattacaggcataagccaccgtgcccggcttgagataatgattcttaacatgtggtatgtagagcaagtgtactcccgccctagactgtgagccccgtgagagatgtggcttcagtgtaacctctctggcctccccagggctacagcacacagtctatagaggtgctcaataaatgtttgttgacccaagtagacacataaggaggtgagttccgacgtgggggtgggggtgccaggaggcagagaaccgaagtagacctggctgcagggctgggatctcagggcagtgctggggactgggaatgtggtgttgagagggcttcagggagacgtgatgggaagatggggaagcctctgcacgtggacagagccaggtggtgtggacaggggctgtgagattggagaaggaggcgtctgggggactggtagcggctcccaacaggggaacgtccctctgggggtggcctttatccatctctgcggggcctgtcctagcttccctcctggctcggccagcctcccggctggtctcttcgctctctttcttgatctctagctctttattcctctgacattctgccccatctgctcccggactcttccgccgcatctgtatcttagtctctttctaactccctgcctggggcccccacctttgagcatatatcggcttctctctctgccgttgtgtttctctggggttatctttccctctactccgcccggacacgccctctatctcttcctcccaccctgtcccagtctagtacctggggtgggggtaatggagagacagctaggtccctaagagaagtcaggggggcgggcccaacctctccatatttacatatgtatgaggtcgcctgggccagtggcgaggaggcggagcttctgggggtgggaagggggcgggcacccccagagccgcagagtataaagaccgcgctcggcgaccgcgggcctcgcactgctgaggagcggagcctccgcctggggggccccccatccctggctgtcccccagctgcgcgtccccgccccacccccgcggctgagccaccaccggtgcagtggtctccgcttggcggagcgagccttgagcttcgttccacagcttctttgcatcttggatttcggggcggccccctcccccacctctctctgcctttttgtaccccgctttttttctgcgttctgctcggtttttgtagccgtctgtttttgcaccccatttcgttttgtttctagacggtttggtggggggtgaagctgcattcataccccttcctcttgttattctcccctgctctgacagcaccccttttcatcgcagttggggggcctaggatcggtgcatcttccgccgcgctgccagcaccccgcagcgcgtggtcgtgcaccccggaatctgcagcagctgcatatctgaggggggtctcctttgcccgcgccgccttcgctccccgtgcttttgggtgtgtggagggcttcagcgcgcggcgcccccgcttctccgcaaccccccgccccgcgcccggactcgccccgcgccaccaagatggtcatccagaaagagaagaagagctgcgggcaggtggttgaggagtggaaggagttcgtgtggaacccgaggacgcaccagtttatgggccgcaccgggaccagctggggtacgcagggccggcacgcaaggggcgggggaaagccgcggggcgacgcctcgggggcgcagggtcccgccgacgcggccccagctcccctcccgggtccccggcgtccagcctccctgccgggctctgggctgggagggggccgaatcgccagtctaatctccccggctggccgtgcggaggcggagaaagtaggtcacagccgccttcccgccccccgcggagccccctcgggcggggggtcgccagctccgcctgcgtgtccgcgccggcgctcacactccctctcggggcctgtccgctccacacgggcgtcccccacctccaaagagcgccccttccctccctccggctctcactagctccgcagccccgtctatttttagctcgtgcccaccccctggaccctgggaacgttcatgagggggcgggtcttggggggtgtgttaggggggttcttcacggcggaagttgtctgtatcccaccgcctggccttgggagccttctgggactgctttgtgggttggggggctgctgatagtatgagttttaccgaggctgcaggttttgctcccatgtcggtgacggagggaggagtggtcgctgtggtgatttgtgtgcatcagccagccaggtgtctgtgacagtcggatgacttggaagcctccccaggctgaccatggcaggactcagggagctgtagtggtcgggggttgggggggtggagggggtctggtgaccggcacaggtgcaggtgaggggtggaattcttccaagagggatggtcaagctgggacgttgagacacaggggacagaggacactgtgtgacacgatttacaatctttccacactgggcaccgtccccatcagtccacccattcggggcctacacgaagtgggtcccatgcaatccattccctcagggaactcaaactccagcccctgggatgagaagaatccagcaatgcttgggagagccagaggacttcatggaagaagtgtcctctgagatggaaggattgggagtccagggtggtgggaacagccggcccttgggtccttacttcaggcgggggagccatggagagatcccaccaagggaaggctgtgggagattctgcctttcctccctgcctctgcccagggtgctgggtgtgaactgagggtggggtgactgttgaaggttctaacaagccgtctctgagagatttgtagctaggctagtgttaggtctttcatttcaggaactgtgttcaaagtttggcttctgaagggcaccaggagagagatgttgctattcaaatctgagggtccagtctctgcggggtggtatgagggtttgcttgtgaatggtggccagtacccgctttaaaaggcaccatgctagcacagctttaagcatgagtacgaatgcagaggtaacagatgtgtgccttgtcaggactatgcatggttgagaagttggaaatgtaattggaggcaaaataacagacctccacaaggtcgggcttcactgtgccctaggaccaggagggggctgggagtcatggctagaagccagacacaactgcctgtttccagtttgtctcattttgcctccagaggaaggctctaagacatccctgtggctctgtgatcagtcccagtgcagaacttcagagtgggtagaggggtgtgtggggatagttgaggttatggtgggaaccttgggccctgctgaccctgtttcctcctccctagcctttatcctcctcttctacctcgttttttatgggttcctcaccgccatgttcaccctcaccatgtgggtgatgctgcagactgtctccgaccatacccccaagtaccaggaccgactggccacaccgggtgagtgtggaggctccccctgccagctactctaactgctcttgtgcccccaaacctccagaaggaactcatagttccttccaggagtttgattttgatgacccaatccccacgtgcttggaagttcttgaaatctgtccaccttcccatttactgcagttgggagctgtgtgatttgggcatgtggcagatagccacaggagatcaccctcccatgaagacgatctcagatattcaccgctgtccccactctggtgttccctgtgtccattttcttccctctgtgtgcagtccctcatcttatagatacccccaacttctgcctttgttggctgtaggcttgatgattcgccccaagactgagaaccttgatgtcattgtcaatgtcagtgacactgaaagctgggaccagcatgttcagaagctcaacaagttcttggagcgtgagtgtgggcctggttatgtgtcagttcaagacttcgggcaggggactggggaccttggaagtggaacatctggcccctgagtctctccctcccacctctttagcttacaacgactctatccaagcccaaaagaatgatgtctgccgccctggacgctattacgaacagccagataatggagtcctcaactaccccaaacgtgcctgccaattcaaccggacccagctgggcaactgctccggcattggggactccacccactatggttacagcactgggcagccctgtgtcttcatcaagatgaaccgggtatctatgaccttggtccccagggtgaatggaggaaggatctggggacaccacctgcagacaattgcatcctttcactggggctaatgggcatgagaaagacttggatgtttgtgtagctgagagaaaaagagaggtgggactcttggaggctaagctctgcagttagaaggctggatgccttttgttttttttttagacagggtcttgctatgttgcccaggctggccttgaactcctggaattaagctatcctcccgcctcaacctccctagtagttgggactacagtccccggcttagcttggtctggatgcccatcttcgacaacttcttcctctgactctcttcaccttccaccctcactccaggtcatcaacttctatgcaggagcaaaccagagcatgaatgttacctgtgctgggaaggtgagttcgttgggccttgtctgcctgctcacctgagtggctcacctgagtgtccttcatggtttctgtgtaattcacctgtctctccctatcttctttgctcctagaggccccatcaccatagaaacaagggggtaagagtgggcttttgggctccactgtagcttgaactccgagggccccgcactcctcttgcttctctctgggatgcagaggcctgctctcctaggggccagacacacgccctcctccaccaacgccctggcctctggcttctctccctaacgcttccaccttctccttcattcccagattgtccgtatcgttcgctctccctcccatatggcccccacccgtcagttccttctaggtgtctggtagctgctgatctgttagcaccatctgccaccagttcgttgtccttgggaccctgttccccgcttcccccccggtctgtcctttctagaaactggctgctccctccacatccccttccttgcttcctattcaacccttaatcatgtatctcttctttcttggctctgctccagaaactgattcctgaggatggggtaagaacttggggtaggagtggagtaggaggctttcgtgccattagcagccttcaggagttcctagaatgatgacagggacagaccatcccctcatctacacacgcacatgcagacacacacacacagactcacagctccagggaggcagacttgagacaggaataattggggcgaaggaagaacaaaagaacaaatggaagtctggtgagctcctgggtgcctgccatccctaactggctcaccccctatcttcctgcacccccacagcgagatgaagatgctgagaatctcggcaacttcgtcatgttccccgccaacggcaacatcgacctcatgtacttcccctactatggcaaaaagttccacgtaagtcccaggggaggcccaggctgatggcgggtgcgggtggtgagctagggaaggaggccgcgttgccccaggcctagaccctgcactgctcctccggcccaggtgaactacacacagcccctggtggctgtgaagttcctgaatgtgacccccaacgtggaggtgaatgtagaatgtcgcatcaacgccgccaacatcgccacagacgatgagcgagacaagttcgccggccgcgtggccttcaaactccgcatcaacaaaacctgaggccccttcctcccaccccatctctctcctgtggatgctcctggaatgtccctgaccctgcctgatccctccctcacccaccccaaaggtatttttgataacagagctatgacttgtctgagcctcacatccttttccttgacttctcaacccagcctgaagtccattgcggttccgtcactcgcctttcccaccaacttctcccaacctcagatcagtcagacagggagctgggctaagatggccacggaggagttaggagcctttctagttctggtttagctgtgagagctatccactctcctgcctgcatatcccctgagagttataggaagtgcccactgacccacccacccacctacaccccccgccacacacacacacaaacgtgcacacgcgtctcatttgacccctttgcttccagagatgaatgtggcactccctccttccattcctaagctctggccaccgtcccttgatctctcatactttctccctgtctacacagtcgccatcttggtgactttgaatttatctggctcctgggcaggtcttctcctcctctccatccctattccctcctctgaaatgcacccctttgtaattgaggacaaggtggttctgtggccttttccctctttgctggcacgttctgcttctcaccctctggtgactctgtgagctgggaaatgagggactggaagtgaggcctgtgttgacccttcctgaaaatcctctagcagcccccgacttcagcagtttctttctttgtttttttgagatggagtttcgctcttgttgcccaggctggagtgcaatggtgcaatctcagctcactgcaacttccgcatcccaggttcaagcgattctcccgcctcaggttcccgagtagctgggactacaggcatgtgccaccatgcccggctaatttctttctttctttttttttttttttgcattttttagtagagatgggggtttctccttgttggtcaggctggtctcgaactcccgacctcaggtgatccacctgcctcggcctcccaaagtgttgggattacaggcgtgagccaccgcgcccggccttcagtttcttcctaggccgttctgtcacccaaatagctgctacccagaggggcggggttgacctaggctgaatatccactttgtttttatggatggctcccttcccccattcgccttcccagaatatccttcaagttccacttcccagggagctctgggggaggggcggccattctggctccgtccccagtggccaccttggaaacatcggctggctttgggactattccacctccttcccctgagcccagatctgcccccaccatcctttctctggcttcttttagcaagttatcaactaatcactaactccttccttttcctctgcatgccagcctgaaaattccaaatctagcctctgaatgtcttggctccatctcttcagacccctttgcctttaaaaaaaaaacaaaaacaaaaacaaaaaaacccataatgcccacagaatgtcaaatgaggggcctcctgcctcctgctctgaatattctgtagctgtagaggcattttaaccctttgtcctccagcatcccttcacttcctcatcctctctaacctcctttttctttttttaatgctgcagcctccacactccacccacaggtggacccttccctttttctctagctggatctgtgtttcttcccttcgggcccccatgttttcctgcacccgccctaccatggtctctctctgcagttatttaatgcctgtgtcagatctactgtaaaaagaggattaagtaaaataaaatgagagcaattatatatataaatatatatcatacacagagccctgtgtgtgggttgttcctttctgagcagttggaagagcccagggaaggagtggagggtggatctgggtggtcccaaggggatcccccaggccttggaggccgctccccagctttgatctcttccttccagtgtccaagcatctacccccttcgccttgactaatttagtgcgcactatcttgggataactccatacaagagagacaggaagcctacgtcccttttgtacagtgatgcttatgaagtgcctactgtgtgcattctaggcaccgtgaggacacagttatgaaagaggcagagatcctgcccccaaggagctccccagtttaacaggagaggtgaggagcacacgagaaactctcatgcagggtagacctaaacatgcttcaaggaaagggagagagcctgtgatgataaaattcagagccgtcaaccgctgtctgtcaggcacgttaaagggaagctttctcagaggaggtagcatttgaacgggagcttaaaggaggggtgatttggagagaaaagagcatcagcaaatgctcagagacagatgagaaaagttgactagaagaaacatgaatgtcaaagcaataagagccgggcatggtggctcacgcctgtaatcccagcaccttgggaggctgaggcgggcagatcacctgaagtcgggagttcaagaccagcctggccaacatggtgaaaccccgtctcaactaaaaaaaaaaaatacaaaattagccgggcgtggtggtgcccacctgtaatcccagctactcgggaggctgaggtaggaaaatcgcttgagcccgggaggcggaggttgcagtgagctgagagtgtgccattgcactccagcctgggcaacaagagcaaaactccatctcaaaaaaaaaaaaaaaagcaatatgaactataagatcctaattttgtggaaagtaaacacacaggccgggcgtggtggctcttgcctgtaatcccagtgctttgggaggctgaggtgggaggattacctgaggtcaggagttcgagactagtctggccaacatggtgaaaccctgtctctactaaaaatacaaaaaattagccgggcctggtggcagatgcctgtagtctcagctacttgggaggctgaggcaggagaatcgtttgaacccaggaggtggagggtgcagtgagctattgtgccactgcactccagcctaggcaacaagagcgaaactccgtctcaaataaataaataaaaaagtaaacagacacataaggatagaaaaaaatatatatgatgtttcctgtagtatatgggggaggggaggggcttatagctaatttttattttcttatcggggccttttttctttttgcaatgaattggtcttcgtatttgtcttaaaaatagctttattacacatgaatccacctatacacaattttatcatgaatgcataatatacacacatgcacgcacacacacacacccctcatcatatagaaaaggatcactgggttttggtcattgttatactaaaattgggtcataccatacacactttcatgcatcttacttttcccactcaataaatatcatatgtcagtacttcccctggcagagctctaatttatttcaagttttatttctttatgaacttaattatttatttatgtacttatttatttttgagacagagtcttgctctgccacccaggctggagtgcagtggtttaatctcggctcactgcaacctccaccatctgggttcaagcgattctcccacctcagcctctcgagtagcagggattacaggcgcccgccagcacgcccggttaatttttgtatttttggtagagacagggttgtgccatgttggccaggctggtctcaaacacctgacctcaggtgatccacctgccttggccttccaaagtgttgggattacaggcgtgagccacctcgccgggcctccttgacaattttgatatgagctttctgcatcattgttcctatctattgtttgtctcttgactttgtagtatcttttttttttttttggagacagagtctcatttccttacccaggctggagtgcagtggtgcaatctcggctcactgcaacctccactttccaggttcatgtgattctcatgcctcagctacctgagtagctgggattacaggtgcacaccactacgcctggctgacttttgtatttttagtagagaagggttttcaccgtgttagccagactggtctcgaactcctgacctcaagtgatcctcccacctcagcttcccaaagtgctgggattataggcctgagccactgtgcctggccaaggccccagttttattttttcagttgtgccagcttcatttattttttttcccccaaggcaacttggaaatgtgtgttgggcaaaaaaatatatttttaagagataggggccaggtgcggtggctcacgcctgtaatcctagcgctttgggaagccgaggcgggtggattgccggagctcaggagtttgagaccagcctggggaacacggtgaaaccctgtctctactaaaaatacaaaaaattagctggatgtggcgacaggcacctgtaatcccagctacttgggaggctgaggcagaagaatcgcttgaacccgggacgtggatgttgcagtgagccaacatcgtgccattgcactctagcctgggtgagagagccagattccatctcagaaaacaaacaaacaaaaaaagagataggggccgggcacagtggctcacgcctgtaatcccagcactttgggaggctgaggtgggcggatcacctaagctcaggagttcgaaaccagcctgatcaacatggagaaaccctgtctctactgaaaatgcaaaaaaaattagccaggtgtggtggcgtatgcctgtaatcccggctactcgggaggctgaggcaggagaatcacttcaacgtaggaagcggaggttgcggtgagtcaagatcacaccattacactccagcctgggcaatgagagcgaaactctgtctcaaaaaaaaaaaaaaaaaaaaaaaaaaaaagataacaaaaagaacaaaagaacaaatatatctaatgtgttccaattaaattgaaatgctaattttggccatgtaataattctcctgtatgagaacatctcctgtatttgttacttgctttccttggtttgtctaccactccatatgtcacatccacctcattccagcagttatatagtaagttttctttttttttttctcgtttctttttttttttttttgatggagtctcactcttgttgcccaggctggagtacagtagcgtgatctcagctcgctgcagcttccacctctcgagttcaagtgattctcctgcctcagcctcccaagtagctgggattacaggcatgtgccaccatgcctggctaattttgtatttttagtagagatggggtttcaccatgttggtcaggctggtcttgaactcctgacctcatgtgatccactgccttggactcccaaagtgctgggattacaggcgtgagccactgcacctgcctagcctatactaagttctctaaaatctggcaaggcaaataggaccccctctccattctgttgcttattatttacttattatttacaattttattatttatgttattttatattatttattttatttattgagacagtctcccgctgtgtcgtccaggctggagtgcagtggcacgatttcagcttactgcaacctctgcctcccggtttcaagggattctcctgcctcagcctctcgagtagctgggattataggtatgcactaccacgcctggctaagttttgtatttttagtatagacggggttttgccatgttgcccagactggtccggaactcctgagctgaaagcgattcacccgccttggcctcccaaagtgctgggattacaggcgggagccaccgtgcccggcctccagtattttgtttatttattttttttgagacagagtctcactctgttgcacaggctggagtgcagtggcacaatctctgctcactgcaacctcctcctccctggttaagagatcctcctgcctcagcccccttagtagctgggattacaggcgtgggccaccactgccaggctaatttttgtatttttagtagagatgggatttcgctatgttggccaggctgtcttgaactcctgacctcaggtgatccacctgccttggcctaaagagagagagagagacggagtctcactttgtcgccagggtggagtgcagtgacaggatctcggctcattgcaacctccacctcccgggttcaagcaactctcctgcctcagcctccagagtagctggaactacaggcacgtgccaccatgcccagctaattttttgtatctttagtagagacgagttttcactatgttggccagatggtctcgatctcctgacctcatgatctgcccgcctcggtctcccaaagtgctgggattagaggcgtgagccaccatgcctggcccaaatccagtatttatttaaacaactagtgacacttactcgttcctatacatttatgataaatttacccaactcacacacacacacaatgaaaatttgggattctaattgaaattgcattatattatatttatctcgagataattgatttttcttatttttttagttttcccatctgagaatctatcattttctttggatcttggcttacgtcgttaaataagggtttgtggtcttctgcatacaggctctgtgccattccttctttgtgtgtgccattcctattacacatttcttaatgtttattgctattgtcttttttttttttttttttttgagatggagcctcacactgttgcccaggctggaaagcactggcaggatcttggctcactgcaatctctgcctcctgggttcaagtgattcttctgcttcgacctcccgagtagctggaattacaggcttacactaccatagctggctgatttttgtattttcagtagagacagggtgtcaccatgttggccaggctgatctcaaacttgacctcagatgatcctcctgcctcagcctcccaaagtgctgggattacaggtgtgagccaccatgcccggccttattgtcattattttgaatggaatgttttcttgttgtctaatttttcacagtgcttctgctggaagataaaattaatatttttctacctactacttatctgccttactaaattctgttaattccataatatttctgagttttggtatactatcctataatcaaaaaggcatatatgtgtgtgcatgtatgtacgtgtttgtgtatatatataatatatataatataatataatatatatataatttccaaacatccactctaaccagaaagaggtatatttactagtgattttcttccttttttgttcctcttgaatgcactaaaaccagagtaggctgggcacagtggctcactcctgtagtctcagtgctttgggaggcagaggcgggtggatcatgaggtcaggagttcgagaccagcttggccaacatggtgaaaccctgtctctactaaaaatacaaaaaattagccgggggtggtggcaggcacctgtaattccaggtattcaagaggctgaggcaagagaatcgcttgaatccgggaggtggaggttgcagagaacagaaaccacgccactgtactccagcctgggcaacagagcgagactccgtctcagaaaaaagaaaagaaaagaaaagaaaaaataaaaccagagtaagtctatatccccacagtttttaatttaattaattaattactttgtttatttattttgagatggagtcttgccctgtcacccaggctgagtgcaatggcacgatctttgcccactgcaacctccgcctcctgggttcaagcgattctcctgcctcagcctcccaagtagctgggattacaggtgcctgccaccacgcctagctactttttgtatttttagtagagacggggtttcaccacgttggccaggctggtctcgaactcctgacctcctgatgtgcctgccttggcctcccaagcgctggaattacaggcgtgagccaccgtgcccggccagtttttaatttttttaaatagagacagggtctttctctgttgcctgggctggtctcaagggatcctcccaccttggcctcccaaagtgctgggatcacaggcatgagccaccatacagccccttatactgttcttgattatttatttatttattttgagatggagtcttgctctgtcacccaggctggagtgcagtggcacgatctcggctcgctgcaacctccgcctttcggattcaagcaattctcctgtctcagcctcctgaatagctaggactacaggcgcgtgccaccacacccgcctaattttttgtatttttagtagagacggggtttcaccttgttagccaggatggtttcaatctcttgtcctcgtgatctgcccgcctcagcctcccaaagtgctgggattacaggcgtgagcctccacacccggccagattatctatctatctatctatctatctatctatctatctatctatctatctatctatctatcatctatctatctctctatctatcatctatctatctctctatctatcatctatctatctatctagagagaggtctggctatgttgacgaggtgttcaactcttggcctgaagcaattctcctgccttggcctcacaaaatgtttggattataggtgtggccacctctttttttttttgagactgactctggctctgtcgcccaggctggagtgcaatggtgtgatctttgctcactgcaacctccgcctcccaggttcaagcaattctcctgtctcagccttcccagtagctgggattataggtgcccaccaccatgcccagctaattttttgtgtttttagtagaggcaggatttcactattgtcagccaggctggtctccactcctgacctcaggtgatccacccaccttggcctccaaagtgttgggattacaggtgtgagccactgcacctggcccagctcttgaccttaattgaaattatcttaatgtttaacttattaggaaaattggtattccattatcagtctattactgtgttaaagtgttttcttttttaaggaaatggctactgaaatttaatcaaattcctttcagtatctgttgatatgatagataatttttctttctaaatttaatatattgaattatgttgatagattttctgctattaaaaccaactttgggctgggcacggtggctcacgcttgtaatcacagcactttgggaggccaaggtgggcgaatcacctgaggtcaggagttcgaggctagcctggcgacacagtgaaatcctgtctctactaaaaatacaaaaattaacccggcgtggtggcgtgtacctgtagtcccagctacttgggaggctatggcaggagaatcacttgaaccgggaggcagagatcacgccactgcactccagcctgggtgacagagtgacactccatctcaaaaaaaaagcaaaaaaaaaaaaaaaaaaaaacccacacacacaaatgaataaatataagtttaattttaaaattaaaatttaaaaattgtaaatgtttttcacagtattttattttattaaaatagaaatggggtgttgtggccaggcgcagtggctcacgcctgtaatcccagtactttaggaggccaaggctggcggatcacgaggtcaggagatcgagaccatcctggctaacacggtgaaaccctgtctctactaaaaatacaaaaaattagccaggcgtggtggcgggcgcctgtagtcccagctactcgggaggctgaggcaggagaatggcatgaacctgggaggcagagcttgcagtgagctgagattgagccactgcactccagcctgagtaacagagcgagactgtgtctccaaaaaaaaaagaaaagaaaaagaaatggggtgttgctatgttgcccaggctgatctgaaactcctggcctcaagttatcctcctgctttagcctcccaatgtgctgtgtgctgggattacaggtaggtatatttttcatttttaggatgcataccaggttcctttcttttctttttaatgatgaaagcatttaaggctattcaatctcctcagagtacgaattttagatttggagacctcgtgttcctaaaatgagggggaaatttttttttcttccatttttttttcttttttgagatggagtcttgctctgttgcccaggctagagtgcaatggcgcaatctcggctcactgcaaccctctgcctcctgggttcaagcgattctcctgcctcagcctcccgagtagctgggattacaggtgtgatccaccgtgcctggccggaaatgttttctaaataaaaaaatagaacatattgatttaaggttgtgaattacaagtttagactgaagccatgaggaaattgggagatttgatttcagatctcattaggataaggcctgggctctttgagtgggagggtagggaacatgtctgccataggtttccagggcctagaacagctcctggcacagggtaaggtaccaatgagtacctgcttgactggatgggacgggaacttgaacacgaccagagggaaagaagtcaccaagtaggaccagagaggttagagtatatagtgtagcagagctggcctgaagtctcagactttgtacttcttttttttgtgtgttttgagatggagcttcactgttgttgcccaggctggagtgcaatggcaggatcttggctcactgcaacctccacctcccgggttcaagcaattctcctgcctcagcctcccaagaagatgagattacaggcgtgcaccaccatgcccagctaattttgtatttttagtagagatggggtttcatcttgttggtcaggctggtctccaactcctgacctcaagtgatccgccggccttggcctcccacagtgttgggattacaggcgtgagccaccgcgcccagctgtaattctcaatccagcaatctatcagctcacaaagaagggtttggcagagtcagaatggatctgaagcagcacagcagaaataaaaacagagctagggacataatctaggaaaaggttgggattgaaagggtggaggatggttgtcaaaaagggagattttctgtttacttgagatctgcagagtaggtccaagtgtcctcgtcgtaggtgaacacacgtgcacacacacaaatggtaactgtgtgtgatgatggacgtgctgattaatttgattgtggtaatggtttcacaatatacccccatatcaaatcatcacactgcataccttgaatgtatgcaattttgggggatcaattatgccccaataaagcctaaaataaaaaaaaattaaaaaaaaaaaaaggaagctcatcaaggtgacctgtctacagaggcaaggacagggactgagcttcaggagctctagtttgcctgctgggtagggacagatgtttaagttaaaagtctctgaaagaggcgggtctggatctcctggggagagtgtttggcattccctagtaagaaagagaaaaaaaaaaggtggtcttgaggtcaggaaggctggtggcttcatagctgtctgggatccttggggcaaggcaaggggctcctgcttgcaccttcagcctggttgatgagctgacaggctggtggccccagaagcccccctggacagtagcacccactggaccctaacacccatctccaccaccagggaggaggaagggcaagccatgtctgactgccccttcaagcactggctccaagagagcagtgggtgatggggaagagcctgcctgctcccagcccccctccctgggagccagcagccctgaggagcatgggcaggcagtactgagctcctcaacccgactctcctccctatcccaagaagccctttgaaaggttttcctggcagagtttaaagcttcaattcattcagctacctggcatgaggcccaggatgaggggatgctgggaaggacctagccccacacccctactcttaccttagctgcccccactttcctgggaccctggctagcaggcctcccactggcctctctccatccagtagcacccacccctgttccccttgggaacccaggtatcctgccactttctgatggagcagatggccaccctggaggctcagccttgctaaatcagacatttaaatcccgtaatccttggtgagaggctgccgagggggaagcagcccagtcctagaagcaggggagggagagaaccttgtgccagccgtggccggaggggaggagggacggttggttcctgagttatgaatggagccaccccctcccttgttgtcatgcagcccgcagactgacccagtctccagcctttgttcccctcccggaacccgggcactgggccccccagcccacactcattgcagactcaggtggctgcttcccagcacctcctcactcacccctgcacctgctgaccccagtagcctgcactggcgttcacccctcagacacacaggtggcagcaaagttttattgtaaaataagagatcgatataaaaatgggatataaaaagggagaaggaggggaagggtggggtgaaaatgcagatgtgcttgcagaatgtaaaagatgttgacccttccagctggacgtggtggctcacaattgtaatcccagcactctgggaggctgagacaggtggatcgcctgagcccaggagtttgagaccagcctgggcaacactgtgagaccccatctctacaaaacatgcaaaagttggctggccatggtggcatgaacctgtggtcccagctactccggaggctgaggcaggactgctcgagccggggaggcaaaggctgcagtaagccaagatcacgccactccactccagcctgggcaacaaagcgagacccagtctcaaagaaaaagaaaaaaaaaaaaaaaaaagaaaaaagaaattgaccctgagcataaaacaagtcttggtggatccagatcatcatatacaagagatgaaatcctccagggtgtgggatggggtgagatttccttttaggtactaaggttcaccaagaggttgtcagacagggtttggctgggccagcagagacttgacaactccctctacctaaccagctgcccaactgtagaaactaccaacccaccgaccaacagggagagggaacaagcaccctcaagggggtcaagttctagaccccatgtaataaaaggtggtttcaaggccagatgtacattatttcattaaccctcacaatgcactctgtgaggtaggtgcaaatgccagcatttcacagatatgggccttgaagttagagaaaattcaacagtgagggacagcttccctggttagtacggtgaagtgggcccctacctagaatgtggctgattgtaaactaacccttaactgcaagaacatttcttacatctcccaaacatccctcacagtaaaaaccttaaaatctaagctggtatgtcctactccccatcctcctccccacaacaaaacaccagtgcaggccaacttgttcagtggagccccgggacaaagcaaatggaagtcctgggtgcttctgacgcacacctattgcaagcaagggttcaaagacccaaaacccaaaatggcaggggagggagagatgggggtgggaggctgtcagtggggaacaagaagtggagaatgtcagtctgagtcaggcccttctgtcttgaacatgagttttttatggcgggaggtagactgaccctttttggacttcaggtggctgtaggagacagaagcagggaggagagatgacatcacatgagtgagagggtctgtgccccttttccctgaccaatgctttgaagggcctaaggctgggacaacgggaattcaaatcaagatggtggccacaccccatgcaaatatgtttactgagcacctcagagtattagtgtgtattagtctcgtaatcttcccttaccccattttactttatttatcttttttgagacggagtttcactcttgttgcccaggctggagtgtaatggtgagatctcagctcaccgcaacctctgcctcccgggttcaagcgattctcctgcctcagcctcccgagtaggtagctgggattacaggcatgcatcaccacgcccggctacttttgtatttttagtagagatggggtttctccatgttggtcaggctgggctcaaactcccgacctcaggtgatccactcgccttggcctcccagagtgtgggattcgtgagccactgcgcccggcccccttaccccattttatatataaggaaactgagtttgacgggggtcacctaggacctgccggtgcatggcagggctgagtatatgacctgaaactctggctgtattcagtattacacaattattaggcccctccttgagaccctccagctctgggctgggagttgcggagaatggcaaagaagtatccacactcgtccctgggtttggatgttctgtggatacactgaggcaagaatgtggttataggattcaaccggaggaagactaaaaaaatgtctgtgcagggctgggacccaatgagatggggtcagctgcctttgaccatgaaggcaggatgagaatggaatcctatggctttccaacctaggaaggcaggggagtagggccaggaaggggctgaggtcactcacctggagtgagccctgctcccccctggctccttcccagcctgggcatccttgagttccaaggcctcattcagctctcggaacatctcgaagcgctcacgcccacggatctgcagcaacagaggagggggagaagtaagtatatacacagtacctgagttaaaagatggttcaagttacaattgtttgactttatgacggtacaaaagcaacatgcatttagtagaaactgcacttcaagtacctatacagctgacttttaaaaatatttatttatttattttgagatggggtctcactctgttgcccaggcgggagtgcaatggtgcaatcttggctgattgcaatctccgcctctggggttcaagtgattcttgtgcctcagcctcccgagtagctgggactacaggcgtgtgctaccacacctggctaatttttgtgtttttagtagagatggggcttcaccatgttagccaggctggtttccaactcctgacgtcaggtgatctacccacctccacctcccaaagtgctgggattacaggtgtgagccactgtgcccggcccttttttaaattttagagatgatgtcttgctatgttgttcaggctggactcaaactcttgggctcaagagatcctcctgccttagcctctcaagtaactgggactacatgtgcatgcgactgtgcctcgtttcttttcttttttttctgagacggagtctcactctatcgcccaggctggagtgcagtggcgccatcttggctccctgcaacctccgcctcctggttcaagcgattctcctgcctcagcctcccaagtagctgggattacaggcacctgccatcacgcccggttaatttttgtattttagtagagacggggtttcaccatgttggctaggctggtcttgaactcctgacctcaggtgatccacccgcctcagcctcccgaaatgctgggattacaggcgtgagccagtgcgcctggccttttctttttttgagtctcgctctgcgcccaggctgtgcctggctcgactgtgcctcctttcatgcaaccatgctgtttctcactttcagtaacaatattcaataaatcacatgagatatacaacattttattactataaaaagggctttgtgttagatgactttgcccaactgtagggtaacttaaatgctctgaacacgtttcaagtaggctagggctgagtgtggtagctcatgcctgtaaccccaatacttggggaggctgaggtggaaggattgattgagcccaggggtttgataccagcatgggcaacgtagcaagaccttgacttcacagaaaataaaaaattagctgggtgtcgtggcatgtgcctgtagtcctagctacttgggagggtgaaatcaccggagcccagggaggtcaaggctgcagtgagctgagatggtgccactgcactctagcctgagtgacagagtgagactctgtctttaaataaataaataaaaattagccgggcgtggtggctcacacctgtaatcccagcactttgggaggccgaggcgggcggatcacatggtcagaagttcgagaccagcctggccaacatggtgaaaccctgtctctactaaaaatacaaaaattagctgggcgtggtagcaggcgcttgtagtcctagctattcgggaggctgaggcaggagaatcacttgaacccaggaggcagaggttgcagtgagccgagatcatgccactgcactccagcctgggcgacagagtgagactgagtctcaaaaaaataaaataaaataaaataaaaataaataaataaaaattagccaggcatggtggtgcaggcctgtagttgaagcaacttgggaggctgagctgggaggatggatggagcctgggaggtggaggctgcagtgagctgtgactgcactactgcactctatccagcctgggtgacagagcaagaccttgtctcaaaaaagtaggctagagaccagcctgggcaacatagtgagactctatctatctacaaaaaattttaaaaattagctgggtatggtggtgtatgcctgtggtcctagctactggggaggcagagttagggggattgcttgagcccaggagggtataatgagctatgatcacatcactgtaatccagcctgggcaacagagcaagatgctgtctccattaaaaataaaataaaagtaggctaggcaggccgggtgcggtggctcacgcctgtaatcccagcactttgggaggccaaggcaggcagatcacaaggtcaggagttcgagactagcctggccaacatggtgaaacctcatctctactaaaaaaaaaaataaataaataacaaaaaattagctgggcgtcggggcaggtgcctgtaatcccagctactcagtgggctgaggcaggagaatcgcttgaacccagaaggcggaggttgcagtgagccgagatcccgccactgcactccagcctgggtgacagagtgagactctgtctccaaaaaaaaaaaaaaaaaaagcaggctaggctaagctatgatgttccttagattaggtgtattaaatccattttcaacttacaatattttcaacttacgacgagtttatcaggaagtaacaccatcgtaagtcaagtagcatctgtatcaggcaaagtcatagaaccattttcatgctctctttaacaattttctttttgaaagctggtctggtcctttaaaatatatattatggtataagttggtgttctgaagttagttagctacaaccaggagccattgtctttgaggcatcactgccccctgatggcaaatgccccaattgcaggtaaaacagtcaagaagaaaacggcattttgagtgttagactggaaactttccacttgataagaggtcccaagacttagtacctgaagggtgaaatattctccatccagtggtttcttctttggctggggagaggagctggtgttgttgggcagtgctaggaaagaggcaaggaaaggtgataaaagtgaatctgaggcataactgcacccttggtctcctccaccgcttcttgtcctgcttgcttacctcgcttagtgctccctgggggcagctcgtggtgaggctcccctttcttgcggagattctcttcctctgtgcgccggtctctcccaggacaggcacaaacacgcacctcaaagctgttccgtcccagtagattaccactactcaggataggaaaagagaagcaagaggcagtaaggaaatcaggtcctacctgtcccatttaaaaaaccaggctccatctactcccaaccacccttgtcctttctggagcctaagctccagctccaggtaggtggaggagaagccacaggttaagaggtcccaaagccagagaaaagaaaactgagtgggagcagtaaggagattccccgccggggatgtgatgagaggtggatgggtagtagtatggaagaaatcggtaagaggtgggcccaggggtcagaggcaagcagaggctggggcacagcaggccagtgtgcagggtggcaagtggctcctgacctggagtcttccagtgtgatgatggtgaggatgggcctccggttcatgccgcccatgcaggaactgttacacatgtagttgtagtggatggtggtacagtcagagccaacctaggagataacacaggcccaagatgaggccagtgcgccttggggagacctgtggcaagcaggggaggccttttttttttttttttgagatggaatctcgctctgtcgcccaggctggagtgcagtggcgtgatctcagctcactgcaagctccaccgcccaggttcacgccattctccttcctcagcctcccgagtagctgggactacaggtgcccagcaccacgcccggctaatttttttttgtatttttcagtagagacggggtttcaccgttagccaggatggtctcgatctcccaacctcgtgatccgcctgccttggcctcccaaagtgctgggattacaggcatgagccactgcgcccagccaagcaggggaggcccttagcctctgtaagcttcagttttttcaactgtgcaatagttaaacccatttactttgcacatctcatggggttatagggaggtcaaataagcagcaggagaaagcccccctactgctcacctggagggccactgacaaccacccttaacccctcctcccagagaccccagttgcaaaccagacctcaggcggctcatagggcaccaccacactatgtcgaaaagtgtttctgtcatccaaatactccacacgcaaatttccttccactcggataagatgctgaggaggggccagacctaagagcaatcagtgaggaatcagaggcctggggaccctgggcaaccagccctgtcgtctctccagccccagctgctcaccatcgctatctgagcagcgctcatggtgggggcagcgcctcacaacctccgtcatgtgctgtgactgcttgtagatggccatggcgcggacgcgggtgccgggcgggggtgtggaatcaacccacagctgcacagggcaggtcttggccagttggcaaaacatcttgttgagggcaggggagtactgtaggaagaggaaggagacagagttgaaagtcagggcacaagtgaacagataaagcaactggaagacggcagcaaagaaacaaacatgcgtaagcacctcctgcaacccactagcgagctagagagagttggcgtctacacctcaggagcttttcttttttttttttttttttgagatagggtcttgctctgtcactcaggctggagcacagtggtgtgatcacagctcactgcagcctccatctcctggcctcaagtgatcttcccacctcagcctcctaagtggctgggactataggtgtgcaccaccatgcctggctaattttttgtatttttttgtagagacgaggtttcatcatgttacccaggctggtcttgaactcctgggctcaggtgatctgcctgccttggcctctttgagagtgctgggattgcaggtgtgagccaccaagcctggtcaggagcttattttcaaaagccaaggaatacacgtggatgaagaaaaagaaaagttctgcatccccaggagagatgctgagggtgtgatgggatggataaaagcccaaattcaaggggggaatattcaactttgggacaggagtcagagatcacacattaagtgggtaaactataaaaaaacactgacaggaagccaaagggtgaagaggaatcccaaagttccaaacaaaagaaatgcagggggatacggccaggcattgaagtctcatggaagccagcccctcagggcaactgaccgtgcaagtcacagacttggctgtcccagaatgcaagaagcccagacggaaaccgtagctgccctggtaggttttctgggaagggacagaagatgacaggggccaggagggggctggtgcaggggccgccggtgtaggagctgctggtgcaggggccacggggggagcagcctctggcattctgggagcttcatctggacctgggtcttcagtgaaccattgttcaatatcgtccggggacagcatcaaatcatccattgcttgggacggcaagggggactgtagatgggtgaaaagagcagtcagaggaccaggtcctcagccccccagccccccagccctccaggtccccagccctccaggtccccagcccaacccttgtccttaccagaacgttgttttcaggaagtctgaaagacaagagcagaaagtcagtcccatggaattttcgcttcccacaggtctctgctagggggctggggttggggtgggggtggtgggcctgcccttccaatggatccactcacagtttccataggtctgaaaatgtttcctgactcagagggggctcgacgctaggatctgactgcggctcctccatggcagtgacccggaaggcagtctggctgctgcaagaggaaaagtggggatccagcatgagacacttccaaccctgggtcacctgggcctgcagagaaggaaccccctcccccaacaccatgccagtgtctgagacagctcggcttcctgtggagcaggaaaagaatggctgcttcacattctctcttccaatgtttcaccacaacccaagcactcctgccccacccctcaccagccatgcacttctttgaggaaaagacaatcagagagggacttccaaccttcccaccactaaatccccaagacttcctaaatgtgcaccctattcccaactcccttcctgtattttttttttttttttgagatggagtctctctctgtcacctaggctggagcacagtggcatgatctcagctcactgcaacctctaccttccgggttcaagccattctcctgcctcagtctcccgagtagctgggattacaggcgagtaccaccacacccagctaatttttgtatttttagtagagacagggctttgcatgttggccaggctggtctcgaactccttacttcaggtgatcggcccgcctcagcctcctaaagtgccaagattacaggtgtgagctaccgtgccctgctcccacctcctgttaacaaggatatagtcattctcagcctgcaatctctgtatggggaaggacacccccttggcccccacccttccccacctgatacacggctccatttctttgattcctttcactgcaaagcttctggaagaacaactgtctcaccgctcacctgcccattctcttcggacactcctcagccctgcattacaaacccctcacgaatggcccgtctcggcttctttaatctcatctcttaacaaccactccctcttccccaaaagctctagctagactggctgcccttctctgctaatcaactggtggttccttggctagccaggaacatgggggtaggctccttcccgtgcagactttaagtcatcctattttaattcacatcacctcatttgcattctcatagcacttacattgtctgatacttttccttgtttattttatctgtttcctctaatagcatatacacttcctaagggcagggcagtgatctatcttgttgtcttgctgaccaaagtattagatcacaatgccttgcacctgcttgggctcaataaatgtgaataacacacaagcctgttatatgagaggttaagagagcgagaaagagcaaggggcagcccctgtgtggaccagcatcttgcacgaagttatgcaactatcatcgcaccttctcccagacaagctttcaaaggctttgccatgttttcttttgttttgtttttttgtttgttttttgagatggagtttggctcttttcgcccaggctggagtgcagtggtgcagtctaggctcactgcaacctctgccttctggtttcaagcaattctcctgcctcagcctcccgagtagctgggattacaggcccctgccaccatgcctggctgattttttgtatttttagtagagacagggtttcaccatgttggccaggctggtgtggaactcctgaccttgtgatccacctgcctcggcctctcaaagcgctgggattacaggtgtgagccactgtgcctggcccgccatgttctttctttctttcttttttcttttgaggcagggtcttgctttgttgcccaagctagggtacagtggtgcaatcatggctcactacagcctcggactcctgggctcagtgattctcctgcctcagcctcccaagtagctgggaccacagaggcctgcctggctaattttttagtctttttctttttctttttttttttggagacggagtctcgccctgtcacccaggctagagtgcagtggtgtgatctcgactcactgtaacctccacctcccagattcaagcgatcctcttgcctcaacttcctgagtagctgggattacaggcgcccaccaatgcgcctgattaattttttgtatttttagtagagatggggttttgccatgttggccaggctggtttcgaactcctgacctcaggtgatcctcccgcctccgactcccaaagtgctgggattacaggtgtgagccactgcacccggccaatttttgagtttttttgtagaggcagggtttcactatgttgcccaggcaggatgctctctttctttttctttttttttttttcagggatgctctctttctttatgccaaatttgtcatcagatttgctaagaaacatgcctactgtaagtgtttgttacacttttctgtttttttttttttttgagacagagttttgctctcgtccaggctggagtgcaatggtgcgatctcggctcaccgcaacctctgcctcccaggttcaagcgattctcctgcctcagcctcccgagtagctgggattacaggcatgcgccactgcgcccggctaattttgtatttttagtagagacggggtttctccatattggtcaggctggtcttgaactcccaacttcaggtgatccgcccgccttggcctcccaaagtgctgggattacaggcatgaaccactgtgcccagcccacttttctgttgtttgcactgacaaaacatcccctaccaaacagctcctttaatggcaggctcttttctttttttattttattttattttattttattttattttattttattttgagacggagtctcagctcttattgcccaggctggagtacagtggcactatctccgcttactgcaacctcctcccggattcaaatgattctcctgcctcagcctgctgagtagctaggactacaagcatgtgccaccacacctggctaattttgtacttctagtagagacggggtttcaccatgttggtcaggctggtcttgaactcccgacctcaggtgatccaccccccttggcctcctaaagtgctgggattacaggcgtgagccaccaagcctggcctacctagtactctgtgtattatgggaaatgtagagttgaggaaagtgctgggcacacagtaagagctcaacaaaggttagctctttctgcaattgttctatttcacttgttctatattattattctagagagaactgtgtgattgttagtgcggatctgtggtactgctcccacccccactccattaatgcaagtacacctccttcagggatctattcagtcaacaggccaggaggtgctgtcctgaaatggggggcccaaagtctcaatcccacttggagggacacaggtctacagacaggtctccctgtctttatctctcaaatcttcagtagcaactaaaatctccgtgtttttcagagcaggaccttcccaggggtaccagcatcagtgggccaggatacaaatgtgccaggctgaactaggccttccaaatggccagggagccaagagaaatgcaggtgcccttggctgggtgggaaggcaatgagatcaactgagaccccaaacaggggcaggcctgaccagaatcttaacagtggctgctggtatcagtcttgaaggcctatatgtccagtgattccctaaacaatatagtacaagtacttacatacatacttgcatgtacattagcattttcattgtatgggggtaatgtaagtaatctagagataatttaaactatatgggaggatatgtgtaggttaaatccaaatactataccgtcttatatatgggacttagacatctgtgggtttggtgtgtgaggagtcccagaaccaagcccctacagatagagggataactatattgccctgtaacctgcaaccctgctatatttatttattagttttggtagctttttatggattttccattaggacttttttttttttttgagatagagtttcactctttttttttttttttgagacggaatctcgctctgttgcccggcgtggtgtgcaatggcatgatctcagctcactgcaacctccacctcctgggttcaagcaattcttctgtctcagcctcccaagtagctgggattacaggcgcccaccactacacccagctaattcttgtatttttagtagagacggggtttcaccatgttaggttggtctcaaactcctgacctcaggtgatcggcctgcctcagcctcccgaagtgctgggattacaggcgtaagccaccacaccctgccggagtttcactcttgttgcccaggctggagtgcaatagcgcgatctcggctcactgcaacctctgcctcccaggtccaagcaattctcctgcctcagcctcctgagtagctgggattagaggtgcccgtcaccacgcctggctgattttttgtatttttattagagttggggtttcaccatgttggccaggctggtcccagggaagccacctgcctcagcctcctaaaagtgctaggattacaggcatgagccaccacgcctggccccattaggacatgtatgtatagaatcatactggctgtgaatgtgttttatttcttcctttctaatcgttattttttttctttccttttttttttttttttttgacatggaattttgctcttgtcgcctaggctggagtgcaatgggacaatctcggctcactgcaacctctgcctcctgggttcaagtgattctcctgcctctgcctcctgagtagctgggactacaggcgttcaccactacccctggctaattcttttttttttgagacggagtttttgcttttgtcacccaggctggagtgcaatggtgcaatctcggctcactacaacctccgcctcccaggttcaagcgattctcctgcctaagcctcccaagtagctgggattacaggcgcccgccactacgcccggctaatttttgtatttttagtagagatggggtttcaccatgttggccaggctggtgttgaactcctgacctcaggtgatccacccacctcggcctcccaaagtgctgggattacaggcatgagccactgtacccggccaacgcctggctatttttttaatattttaatagagacgaggtttcaccatctttgtcaggctggtctccaactccagacctcaggtgatctgcccacctcggcctcccaaagtgctgggattataggcgtgagacatcgggccactaatcattatttctttttctttttttttttttgagacacagtcttgctctgtcgcccaggctggagtgcagtggctcgatctcagctcactgcaagctccgccccctgagttcacgccattctcctgcctcagcctcccgagtagctgggactacaggcgcccgccactacgcccggctaattttttgtatatttagtagagacagggtttcaccgtgttagccaggatggtctcgatctcctgacctcgtgatccacccgtctcggcttcccaaagtgctgggattacaggcctgagccaccgcacccggccctcattatttctttttcttgcctggttaaaacctccagtatggtatcaacgttgtgagagtcaaatccttttctagttcctgatcttagaggaaaaagcgttgagttttcttttcttttttttttttttttttttttgagacgaagtctcactctgtcacccaggctggagtgcagtggcacgatctaggctctgcaagctccgcctcccgggttcacgccattctctcgcctcagcctcccgagtagctgggactataggcgcccgccaccatgcccggctaattttttgtttttgtatttttagtagagacggggtttcagcatgctagtcaggacagtctcgatctcctgacctcgtgatccgcccgcctaggcctcccaaagtgctggcattacaggcgtgagccaccgcgcccggcagcactgagttttctaccattatgtatgctgctagtggaactccgactgtggacgccctgttatcaaactaggttaagtttcctttccctagtttgctaggaggttggttggtttgtaatcatgcatatgtgttgaatatcattaactgcttttgctacatctgttgaaatgatcatagggtttttatgtttccctttgttaatgtggtgaattacacagactgatttttttccccccagtaaagaccagtctgactatgttgcccaggctggtcttgaaatcctgggctcaagagatcttcctgcctcagcctcctaaaatgttgggattacaggcctgagctactgcaccaggccaatttttgaatgttgaatcagctacaatcatgagataaacattatttggttagaatgtatttatcctttttctttttctttttttgagatggagtctcactctgttgcccaggctggagtgcaatggtgtgatcccagctcagtgcaacttctgcctcctgggttcaagcgattctcctgcctcagactcccgagtagctgggatttcaggtgcccaccaccatgcccagctaatttttttttttttttgagatgaagtcttgctctgtcgcccaggctggagtgcagtggcacgatcttggctcactgcaacctctgcctcccgggttcaagcaattctgcctcagcctcctgagtagctgggattacaggcaggtgccaccacaccggctgatttttgtatttttagtagagatggcgtttcaccacattggtcaggctggtcttgaactcctgacctcgtgatctgcccacctcggcctcccaaagtgctgggattacaggcgtgagccaccgtgcccagcctgatttttgtatttttattagaaacggggtttcaccatgttggtcaggctggtctcaaactcctgacctcaagtgatctgcctgcctcagcctcccaaagtgctgggattacaggcgtgagccaccgcgactggcctatttatccttttttctatattaccaggtttggtttgctaaaattggttagctgttgcatgtctatgctaacaggaatattggtctatattttcttttcttataatgtccttgtttggttttggtaccaggattatgctggcttcgaaaacaagttgggaaatattcctctattttttctttctttctttttttttctgagacagggtctcactctgttgcccaggctggagtgcagtggcgcaatctcggctcactgcaacctccgcttcccaggttcaagggattcttgtgcctcagcctcctgagtaactggcattacaggtatgtgtcaccacgcctagctactttttgtatttttagtagagatggggtttcgccgtgttggccaggctggtctcgaactcccgacctcaaatgatcccctgcctcagcgtaccaaagtgctgagattacaggtatgagccaccgcgcccagtctgttcctctgttttctgaagagtttgtgtaagatgggtactgtttcttcctccaacgtttaaagagagcagagaacagaggagataaatagaaaatagcactaagaggtcaggcatggtggctcacacctgtaatcccagcactttgggaggccgagatgggatgaaagcttgaggccagcagtttgagaccagcctgggcaacatagtgagatcctgtcaatacaaaaaaataaaatagttagctgggtgtggtggagtaatcccagctactcgtgaggctgctagaggactgcttgagcccaggggttcgaggctgcagtaagccttgattgtgccattgtactctagcctgggcaacagtgtgagtccctgtctcaaaaattaacaaagaaaaaaagaaaatagcactaaaatggtagccctatactccaactgtaaaataattaaaattaaaagcattcagtagagaaaggaagcctatttcaacaagtggagacagaataactggatttccatacaggaaagataccagagactgactcctacacctcacaccataaacaattaattttaagaattaattaatggctcaaggaccttactgtaaaacttacaaccataaaggtcctaaaagaaaatgtaagataatatcttcatgaccctggggttaaaaaaaaaaaaaaagatgtcctaaacaggacaaggcaaatactgaacataaaaaagataaatccactcctcttaagatactgtaaactctgtaaagcaaacaaataggcaagcaacagatcagaagaaaacattcacgacacatggatctgataaaggacttgtatccagaatgtataaagcagtcccacaactgaacaataaaaacaaacaaaaaaccaaaataacaggtaaaagactcgaagagctactttacaaacaaaatacgaatggccaataggcacatgaaaaaatgctgaacatccttagtcaatagagaactgtaaattacaaccacaaggatataccacattagaaagactgacaatacctaatgtccggaaggctgtggcacaaccataataactcccataccttgctagttggagtgtaaaatggtacaaccgctctggaaaactcagagcttctgaaaaagttcaaaatacagctactttttacttccaaactcgcaattcccctcctaagtatttctccaagaaacacgaaaacatatgatcacaaaaagaattgtacaagaatgtttatagcagctttatttcataaccgcaaatgggaaacaactcaaaaggccatcaaaaggacggatatacaatcgatggactatactaaatgaaaaggagcaaaatactgatatatacaacatgaacgaatgtcagacagtacattgaaggacagaagcccgacaaaaatgagcacataatgtatgattccccccttttttttgagacggagtttcgttcttgtcgcccaggctggagtgtagtggcacgatcttggctcactgcaacctctgcctcccgggttcaagcgattctcctgcctcaccctcccgaatagctgggattacaggcacccaccacgcccagctaatttttgtattttttagtagagacggggattcaccacgttggccacgctggtctggaactcctatcctcaagtaatccgcccgcctcggcctcccaaagtgcaggcgtgagccacagcgcccagcctgattccattctatatgaagttctccaacaggcaaaatggttatggagatcaaaataaaggtggggtcgggaatcgactgggaagagacgtgatgaaacgtttctgggacgatgaaaagggtctgtgacttggtaggcatcacggagcggttaggggccaaaactcatcttcctgtgcacttgctgtgtgcactggcgctgtgtgtaaatgccacctcgatttaggaaaaagatgacgtaagtacggcacaaagtggccggtacgcggcaggtgcatgggaagaaactgcggaatgaaacaaccgcgagctaagagatggggcagcgggagaaatgaattcgagttccgcctcctaccaggaagaaccggctcgggccggagggctgcacggaggaccacacggacgcctgcgggcccgccccttccgcttcacgacgttcagcctgcgtctggaactggaatggcctagcccaaagctagataacaggtagattgtttttccgacaaattatcaaacgacccatcattgcactctttcaaaatttgattctcagacgtacccattctttttttttttcctccgggaagatgagatatactcattcttgaaaatacctccgggcttgccttctgcacacttctttccctccctgtctcacgccatggtagcgtccgcctaggttgcaggcgacccgcggggtggggcacaccattcaaagaaggggagggattgaggtttgcatcaaaacaaatacccctgcctttgcaaaggccataactaagtaatccagaaaaagaaatgcaggcggagaatagcagcctccctctgccaagtaagaggaaccggcctaaaggacattttctctctctctcctcccctctcatcgggtgaatagtgagctgctccggcaaaaagaaaccggaaatgctgctgcaagaggcagaaatgtaaatgtggagccaaacaataacagggctgccgggcctctcagattgcgacggtcctcctcggcctggcgggcaaacccctggtttagcacttctcacttccacgactgacagccttcaattggattttctccatctagcggagccgggggctgcctggaaagatcgctccaggaaggacaaaggtccggaagttgtgggaccttagcagcttgggctccccggatcacccccaaatgatcatttcggaatggagccccagttttcactaggatgccatgggctctaaaatatacagctatgagttctcaatgtttcgagatccaaaagtctcagacctcaatgctttgtgcatcttttatttcagggattccctacgcccagcaccgggtggatgtgcaaagaagtacgctttaggccggctcaaggttccccaaagctccactcctctgcctaggcgttcaactttgagttcggatggtcctaacatccccatcatctacacccaggtctcccaacaatgcaactcctatgatgatccctctagccaagcttccatcccactcacccccaaactcgctaagtccccactgccccacccccagccccagcgattttcccgagctgaaaatacacggagccgagagcccgtgactcagagaggactcatcaagttcagtcaggagcttacccaatccagggaagcgtgtcaccgtcgtggaaagcacgctcccagcccgaacgcaaagtgtccccggagcccagcagctacctgctccctggacggtggctctagacttttgagaagctcaaaacttttagcgccagtcttgagcacatgggaggggaaaaccccaatcccatcaacccctgcgaggctcctggcacaaagctggacagtcgccatgacaagtaagggcaagtaatccgcctgccggaggaagcaaaggaaatggagttggggaggagggtgcagagtcaggattctcgccgacctggtgccgtagatactaacattttggggtggaaaattctgcaagccagagctgtgagggcagaattggtggaaatcattttggaggaatcctgcattgtgtcaaatatgaagggtggaaggaagaaagcttttgcgtttgctctcagctggatcctttcttctcatcagttaaaatgtcattttttaggaaggctttccgtaatatcacaccctaacgttttctcccagatactttatatcacaccatcttatttaatctccttcacaacccttatcactctgataagatttatttgttcattgctttcagtacatggaaacgtaagccttatgaggatatagaatttttctactatcttattcattgttgtattcctgagtgcctatatcagtgctgggtagcaagtaagagctcgataataaatattttttgaatgagggagacaggtctgaagcctggagaatgagatgcagaagaggtgcaagacctgctgcgccctctgcaggcggcgggggggcggtgcaggtgctttaagaattaccgcgggactcggtagggggagcgtaggcgcttctcgccaagatagaagcgttcagactacaactcccagcagccacgaggagccctagggcttgatgggaacgggaaaccttctaacctttcacgtcccggctccgcgggttccgtgggtcgcccgcgaaatctgatccgggatgcggcggcccaatcggaaggtggaccgaaatcccgcgacagcaagaggcccgtagcgacccgcggtgctaaggaacacagtgctttcaaaagaattggcgtccgctgttcgcctctcctcccgggagtcttctgcctactcccagaagaggagggaagcacaggtgggtttctttagctctgcgtcggatccctgagaacttcgaagccatcctggctgaggctaatctccgctgtgcttcctctgcagtatgaagactttggagactcaaccgttagctccggactgctgtccttcagaccaggacccagctccagcccatccttctccccacgcttccccgatgaataaaaatgcggactctgaactgatgccaccgcctcccgaaaggggggatccgccccggttgtccccagatcctgtggctggctcagctgtgtcccaggagctacgggagggggacccagtttctctctccactcccctggaaacagagtttggttcccctagtgagttgagtcctcgaatcgaggagcaagaactttctgaaaatacaagccttcctgcagaagaagcaaacgggagcctttctgaagaagaagcgaacgggccagagttggggtctggaaaagccatggaagatacctctggggaacccgctgcagaggacgagggagacacgtaagtggtgatggcagtggagtgtggagtctggggagatgaagtgtgaggtcgatctgtcctctggtcctgagacccacttctccaggcctctgccccctttgcttggcgacccaggtttattgtcccccatcttcctttcagcgcttggaactacagcttctcccagctgcctcgatttctcagtggttcctggtcagagttcagcacccaacctgagaacttcttgaaaggctgtaagtggtaaggataacaacggggcagggagctgaccacccccgagattttcactgtaaaacagtccagttttctaggagagggatgccccagagctgggagaagcggcacgtagcccttttagactgagcttacattttatctagcagtttgtgtcttctacttccctcaaggattcaggggggcttacctaccccagaggcaggctcagccctagccctacacttgaaaagcataggtctggccagctttctaactctcccctgtttctagggctcctgacggttcctgcatcttgaccaatagtgctgataacatcttgcgaatttataacctgcccccagagctgtaccatgagggggagcaggtggaatatgcagaaatggtaaggactggggctaactgcctcttcatcaatgctgcacatttaagtccttcgtggagatggaaaaagtgtagtccaagtgtttcctgttcacaaacgggactgtttttcaagacgagtttccacatgtagcgttttctgccccgaattctgaagttatttagagagaggtttcccctttctttaattaggaatctgtgttttttgctaaaaagtagtgaatttcttgtggcagcatatatatatttctatttcttatttttttgagacaaggtcttgctctgtcacccaggctggagtgctgtggtgtgatctcggctcactgcaacctctgcctcccgggttcaagcgattctcctgcctcagcctcacaagtagctggtattacaggcgcacgccatcacactcgactaatttttatagttttagtagagacggggtttcgccatgttgggcaggctgatatcaaattcctgacctcagaggatccgcccaccttggcctcccaaagtgcggggatcacaggtgtgagtcaccgtgcctggcttatagctatttattgattgactactgatatatgttagtcactgtgctgggataaagtggtggacaagacagatgaagggctggtttgctttctgtgtgggagacagacaacaaacatgtaaaccagcaagcatcaggaccaagatgatgataaatgctctgaaggaaatacacagaatgaagagagactaactagaggaaagcacattgcataaaatggtcaggaaggagctctctgaaaaggaggcatttgagctaagacctgaaggaggataagggatcagtcatgtgaaggcttctggaaagagctttccaggaactggcaatgatactataaacacccagaactgggaaatagctttgtgcgttaaaagaccagaaaggccctgcatggtggctcacgcctgtaatcccagctactcaggaggccgaggtgtgcagatcacttgaggccaggagttcgagaccagcctggccaatatggcaaaaccccatcgctactaaaaataccaaaattagacgcatgtggtggcacgcgcctgtaatcccagctacttgtgtggctgaggcaggagaatctcttaaactcaggaggtggaggctgcagtcagacaaaattgtaccactgcactccagcctgggcgacagagtgagactccatctcaaaaaacaacaaaacagactgggctcagtggctcacacctgtaatcccagcactttgggaggctgaggtgggcagatcacctgaggtcaagagtttgagaccagcctggccaacatggcaaaacctcatctctacaaaaatacaaaaattagctgggtgtgatggtgggtgcctgtaatcccagctacttgagaggctgaagcagaagaatcatttgaacccaggagatggaggttgcagtgagccaagatcatgtcactgcactccagcctgggtgacagagtgagactccatcccaaaacaaacaaacaaacaaacaaacaaacaaacaaacacaaaacaaaaaacccagaatgctggtatagccagactgaggcaagtgagggggacagaggggtgaggacagagaagagcagccacgtcgtgttggttcttatgggtaaggcatttggagtttatttgggaagtcatgagagaggtgttttttttttttttttgagacgagtcttgctctgtcgcccaggctggagtgcaatggcgtgatctcggctcactgcaacctctgcctcctggattcaagcgattctcctgcctcagcctcccgagtagctgggattacaggcacccgccaccatgcccagctaatttttgtatttttttaaatagagacggggttttaccatattggccaggatggtctcgtactcctgacatttgatccgccggtctcggcctcccaaagtgctgggattataggcatgagccaccgcgcctggcttaatttttgtatttttagtagagacaggttttgccacgttggcctggctggtctcaaactcctgacctcaggtgatccacctgcctcagccttccaaagtgctaggattacaggcgtgagccaccatgccaggccatgagagaggttttttttgtttgtttgtttgagacagagtcttgctctgttgtccaggctggagtgcagtggcaccatctcagctcaccgcaacctccgcctcccaggtttaagtgattctcctgcctcaaccttccgagtagctgggattacaggcatgtgccaccacacccggctaatttttttgtatttttttagtagagatggggggttcatcatattggccaggctggtctcgaactcctgaccttgtgatctgcccaccttggcctcccaaagtgctgggattacaggcatgagccactgcgcccggccaagagagttttaaaacagaagagtgaatggtttatgggtgggcaagagtgaaatccagggccaggcacggtggctcacgcctgtaatcccaacactttgggaggctgagatgggtggatcacctgaggtgaagagttttagaccagcctggccaacatggtaaaaccctgtctctactcaaatacaaaaattagttggggctgggtgcggtggctgactcctgtaatcccagcactttgggaggctgaggcaggtggatcacctgaggtcaggagttcgagaccagcctggccaacatgatgaaaccccatctctattaaaaatacaaaaaattagctgggcgtggtggcgggcgcctgtaatcccagctactctggagtctgaggcaggagaattacttgaaccaaggagatggaggttgcagtgagccaggattgcaccactgcactccagtccaggcaacagtgtaagactccgtctcaaaaaaaaaaaaaaaaaaaaaagattggctatagttttctcccacccatcctaatcaggttctgcctccatcgcttcctgaaagtgctcttgtcaaggtcactaatgtcctcttgggtcattctccttttttttttttttttttttttttgagacagagtctcgctctgtcacccagctggagtgcagtggcgccatctcagctcactgcaagctctgcctcccgggatcacgccattctcctgcctcagcctctcccgagtagctgggactacaggcgcccgccaccacgcctggctaattttttgtatttttagtagagacggggtttcaccatggtctcgatctcctgacctcgtgatcctcctgcctcggcctcccaaagtgctgggattacaagcatgagccaccgcgcccagcccctcttgggtcattctctaaattcgcctcactgcatctcttagcagcatgagtcactgtctccacctccctgcgctggagcactcaggcactcagggctctgctgggccttctcctcctccatcagcactctttcttttttttcttttttttgagacggagtttcaaaaaatcagacccaccaaggcatgtggcagttgtgttgctctttgctcggtacccgctagaggtctgttgccattaatttgaaatgagaccagttagtgtgactgtgcatctttcctggcaagttaaatgactatagtttctctgtttgtaaaatggggatgattataatagcacctgcctcacagagttgtgagaattaaaataatcagtaatgaattaaagcacttaaggccgggtgcggtggctcacgcctataatcccagcactttggggggccgaggcaggtggatcgcctgaggtcaggaattcaagaccgacctggccaacatagtgaaaccctgtctttactaaaaatacaaaaattagccgggcttagtggcgggcgcctgtaatcccagctacttgggaggtttgaggcaggagaattgcttgaatccaggaggcgaaggttgcagtgagctgatcgcaccactgcactccagcctgggcaagagagcaagacttagtctcaaaaaaaaataataaaattaaaaaaaagtacttaaaacagcacctagcatatagtaagtgttcggtaaacactagtagtcactggtatcagttgtgtgcaagccaagaataggaggatggtatggttgaggtttaccaggagagaaagacaagggtatcctgagagtgtcttcaagagtgtgcatgccatggtggactagaatctacagtgggtaaggaactggactgtaaataagtttttgatgaagctgaataaattgtcatggtagaaatagcagagcagggtcaggcctggtggctcacgcctgtaatcccgacactttgggaggccgaggcgggtggatcacctaaggtcaggagttcgagaccagcctggccaatatggtgaaaccccgtctctactaaaaaagatacaaagttagccaggcatggtcgtgattatgatattaatgattataatattaaaacattttaaaaaatatatcttgcaatacagatagtcaatttgttttctttttttctttctttttttttttttttttttgagacagagtctcgctctgtggcccaggctggagagcagtggtgtgatcttgcctcactgcaacctctgtttcccggttcaagcgattctcctgcctcagcttcctgagtagctgggattacaggcacgcaccaccgcacccggctaatttttgtatttttagtagagatggggtttcgccaagttggccaggctggtctcaaactcccgacctcaagtgatccacccatttccgcctcctaaagtgctgggattacaggcgtgagccactgctcctggccagtcagtttgttttcaaaagatttttgtggctggtgtggtggctcatgcctataatcccagcactttgggagaccaaggtgggaggaatgcttgagcccaggagtttgagaccagccttggtaacacagccagatcctgtctctatcaaaaaagttgggcctatggtcccagctacttgggaggctgaggtgggaggatcgcttgagcctgcgaggttgaggctgccatgacctttgattgcaccattgtactctagcctgggcgacagagtgagactctgtctcaaaacaaacaaccaaaacctttttgtgcttttttttttttttttcctgctagtgtaccagttctatcgcaacctctctcattaggtattttcatttttagtgtctacaagcttagcatttgaaatagataactttttttttttgagatggagtcttgctgtgtcccccaggctggagtgcagtggcgcgatctcagctcactgcaagctccgcctcccgggttcacgccattctcctgcctcagcctctcgagtagctgggactacacgcacccactgccaccacgccaggctaattttttgtatttttagtacagtcggggtttcaccatgttagccaggatggtctcgatctcctgacctcgtgatccgcccgccttggcctctcaaagtgctgggattacaggcgtgagccactgcacccggccttaaatagataaaatttgtataggtcagaaaattggggaagggtgtatttgggtatttccatatacttgtgtgtactgagtcttcttcccaatatagtttctcgggttttctcctttcttttccaccttttcacagaactttctgcaagtctcatttccagctccccagcgtctttcctgagtacttgccctgccccgtgggtcttgcaggaagcctttactcctcgtcttgccctctccaggagacactttgcatcctctgtaccctttatctctcagggtggggacggggaatgtcctcattcccaaatgctgtagccacacaattgctctttcgtctttgtgaaacttttcccttgaggcttatgctgattctctctcccgctgacgacgttggcactgtacagccttccggtgctctcctgttcgcccgccattttggtgacctcaggtatccaagccaaaagccagggtctctctcatcctttaatctttaatctccctgttcctaacccctcacatccaattacttcccaaatcccatcaagtctgcctaatcttcctaatccacccacatctgtccctcccactgcctctactttaattcaaggtcctattattttgggccttatgttgctgaaacagtctcctgcctccttttgctcattaaaaccgtatttgttgactctgcttattctgcaccacgtgttggggaagcagtggtgagagcgaggcagatgtgattccctccttctctgataggtatgacggaaggggagtgaggagcaccaggggctataggaaagaggaacaggggcgccttgcttagctggaggggttagggaagcgttcccagaggaagaagcatctaagagacctgaaggatgactaggattcagccaggaggagtcgttgggggagatgaaggaagaatattccagacttggagcctaggacatgtgaaagccagtgggttgaaagtgtggcgagttggcactttatgggacctgagagtcaaaatggcgggactcagagattttttttttttttttttttttttttgaaatggagtcttgctctgtcgcccaggctggagtgcagtggcgcgatctgggttcactgcaagctccgcctcccaggttcacgccattctcctgcctcagcctcccgagtagctgggactacaggcgcccgccaccacgcctggctaattttttgtgtttttagtagacacggggtttcaccacgttagccaggatggtctcgatctcctgaccttgtgatccgcccgccttggcctcccaaagtgctgggattactggcgtgagccactgcgcccggtcaggactcagagatttttatgggaattagcagatagagataagccttgagaggtgggtcgggggtagcacgtggtaatggaagactaggaggaggaactggcaagatttggtattgggttggaccaggagtggaaaggaagtgaagagtggtagcagtcaaggctggtgctcagatttcaggattgagcactggtgtggagtccaggaggaacagcaggtttgatggtggtggatgccgggcctattatggacaaattgagtttgaggaacctgtgggatgatcaagtggcactgtccaccaggcagttggatatatgggttcagagtatagaggtggacactgaagtcctggctggttgacatcagcctgaggcccagaagacaactgacgaaggacagtgtccagactatttatctctcacaaatcagtaagaaaaagacggctgggcatggtggctcatgcctgtaatcccagcactttgggaagccgaggcaggtggatcacccgaggtcaggagttcaagaccagcctgaccaacatggcaaaatcccgtctctactaaaaatacaaaaattagccgggtgtggtggcaggcgcctgtaatcccagctactcaggaggctgaggcaggagaattgcttgaacctgggaggtggaggtagtagtgagccgagatcgtgccactgcactccagcctggggacagagggagactctgcctccaaaaaaaaaaaaagaaaagaaaaagaaaaaagagaagaaaagaaaaagacaacaactggtcaggcatggtggctcacacctgtaatccccactttgggaggccgaggtaggcagatcacttgaggctgggagtttgagaccagcctggccaacatggtgaaaccccatctctactaaaaagtataaaaattagccgggcgtggtggcaaatgcctgtggtcccggctccttgggaggctgaggcatgagagtcgcttgaacccaggaggcagaggttgtagtgagccaagatcgtgccactgcaccccagcttggggaacagagaaagactctgtctcaaaaagaaaaaaaaagaaaaagaaaatgggcaaaatttatgaaaaggtgtacctaactaaatggccagtaaacatagaggaaatatctaatctctcttatagtaatgatggaaatacaaatttatgctgtaatgaaataccatttcaccaccttcaaattgagaaaaatgtaaaagtctggcaataccaagaagataaagaacaatagacacttttttttttttttggagacaggatcttgttctgttgcccaggctggagtgcagtggtgcgaacatggcacactgtagcctcaaactcctggggtcaagcagtcctcctgcctcactctcccaaacaggtgggactacaagtatgccaatatgcctgactaattttttaattttttgtaaaactggggtcttgctatattgcccaggctagaatagagactcttatacactgctggtgggagaggacattgggacaagtgctttgggaaagaaattgacattatagtatcttacaaagtttgcaaagtgcatagcgtagagaccagtaattttactcttcagcagaaactgtagagaaacccttctacatgtgtacagaatgttaaagcacactagccaaaaaacagaaaaacatcagtgattctaaatagaagaagggtagatcagtttgaatatattcatgagtagagtactatacaccagtgaaaatgcatgaattagagcaaaatgtgtttccatggttaaagcttgctatcacagagggatgtatatgatataataccattactgttaagtctaggccgggcatggtggctcatgcttgtaatcccagtgcattgaaaggctgaggtggctggattgcttgaggccaggagttttagaccagcgtgagcaacacagacccctgtttctacaaaaaaataattttaaagattagccgggcaggctgggcgtggtgtctcatgcctgtaatcccagcacttgggagactgaggtgggtggatcacgaggtcaggagttcaagaccagcctggccaagatggtgaaaccccgtctctactaaaaatacaaaaaaattagccgggcgtgatagcaggcgcctgtaatcgtagctactcaggaggctgaggcagagaattgcttgagtctgggaggcagaggttgcagtgagccaagattgtgccactgcattccagcctgggcgacagagcgagactccgtcaaaaataaataaataaataaataaataaataaataagccaggtatggtggcttatgcttatattcccagttactagggaggctgaggccaggggattgtttgcttgagcccaggagtttgaggtttcagtgagatgattgcgccactgtgctccagcctaggcaacagagtaagaccctgtctctaagaaaagaaaaaattaagtctaaagacctgcaagacaacgttagatactgttttttttcccatatgaatatactcctaggctgggcgcagtggctcacacctgtaatcccagcactttgggaggctgaggcagaaagatcacttgaggccaagagttcgagaccagcctggccaacgtggcgaaaccctgtctatactaaaaatacaaaaaattagctgagcatggaggtgaactcctgcaatcccagctactcgggaggctgagacacaagaattgcttgaacctgggaggtggaggttgcagtgaactgagatcgtgccactgcactcagcctgggtgacagagtgagactctgcctttaaaattaaaaaaaaaaaatttatatatatatatatatttatatatatatatatatttatatatatatatatatatatatatttatatatatatatatatatttatatatatatatatattcctaaggaaatgtatgacagtgataaattcaagatagtgtttacctctgagggagagtttctgttaggaaaggggtttaaacatatctttttgttcagctggatggaggggtcacagggctgtttttttaataagatactttgtatgtttgaactgtttaattttttttctttatttttgtaaggaggtttttttgtttccatttttgtatttttgagacagtgtttctgttgcccaggctggagtgcagtggcaatgatctcagctcactgtggtctctatctcctgggctcaagcaattctcatgcctcagcctccctagtagctgggactacaggcatgcactaccatgcccagctaatttttttttcttgtagagacagtgtttcaccatattgcccaggctggtcttgaactcctgggctcaagtgatctgcctgcctcagcctccctaagtgctgggattacaggtgtgagccactgtgctcagccgataatttttttcttttctttttcttttttttttggggggcactgtctctctgtcacctagggtggagtgcagtggtgcgatctcagctcactgcaacctttgtctcctgggttcaagggattctcctgcctcagcctcctgagtatctgggattacaggtgtccaccaccacgcctggcaaatttttgtactaatatttttttaaaggatcaaatggcacctagcatgtactcagtaagtatttgaataattggttggttctttgtctctgggttgaggtattattatttgtttcttcctctctaagtgtttataaagaaaaagtataaggcccggcacggtggctcacacctgtaatcccagcacttttggaggctgaggcgggtggatcacctgaggtcagaagtttgagaccagcctggccaacatcatggtgaaaccctgtctctattaaaaaaaaaaacaaaaacaaaattagccaggcatggtggtgcatgctctgtctcaaaataataaaaaaaaaaaagtatgaatctatatggcttttggtggctaaatttgacattaaagtctgagctcacccttgaacattgagacagagtctgtgctccatatatacaccccatctgccacaacactgctagaggcacgcgcctcagactccttttccctccgagtgactcagccattcccccgtctctgtataggtccctgtccttcgaatggtggaaggtgataccatctatgattactgctggtattctctgatgtcctcagcccagccagacacctcctagtaagtaatgtttgcctccctgctcgccgccccaccacccagtttcaagcagggcctcttgggagagtcaagggctgccaggggtctttggaggaggaaggcttggcatgcttatcagaggggctggtcagttggcttcctccccttcctttttttttttttagattgagtctccctctgtcacccaggctggagggcggtgatgcagtctcagctcactgcaacctccgcctcccaggttgaagtgattctcctgcctcagcctcctgagtagctgggattacaggtgtgcaccaccacacccagctaattgtgtatttttcatagagatggggtttcaccacgttggccaggctggtctcgaactgacctcaggtgatccacctgccttggcctcctgaagtgcttggattacaggcatgagccaccacacccagcctcatttttgtatttttagtagagacagggtttcaccatgttggccaggctggtctcgaactcctgacctcaagtgatccacctgccttggcctcccaaagtgctgggattacaggcatgagccactgtgcccggccattcctccccttcctttgacagcaccggggtttcagtgtccatgtctctctcagcgtggccagcagcagccgggagaacccgattcatatctgggacgcattcactggagagctccgggcttcctttcgcgcctacaaccacctggtagggaccgccatactcagccccagcactcgtactggcccggctctccttccttgagggcagctgaggctttgcaagacctgttttcagccctttccttcccccaggatgagctgacggcagcccattcgctctgcttctccccggatggctcccagctcttctgtggcttcaaccggactgtgcgtgttttttccacggcccggcctggccgagactgcgaggtccgagccacatttggtaagcatctgtgcctccaagggaggaggagagggaagggcactgccacctgcacaggggccttttgtgagccgggggccacctgtgggggttcacgccgtcctctgtacggccccgggagcaggtgcagcccagtcggcagaggagcaaacaggctcagagcaggtaggaaaccttcccaaggccaaccagctggtcaaaggactgcttccttcctgaactcataccctgtcagctgtggagcttttggtctctgaaatctttctagaaaattgttgataaagctgattccgttttcctgtaggccttcaacttgcatctctccaaggaagaactgggatttgagagggatgaagtggggcttgggcatttaggtcctttgggaggatagatgtggggagcatcagaggtctttgtcctgcttgtgacagacagcatgggggggatgttgagtccaagcatgttggtgctgggacgggagacagacctctgcttagcctggttagtgccaggagccattgccccctcccccactttgttccttccctctctagcaaaaaagcagggccagagcggcatcatctcctgcatagccttcagcccagcccagcccctctatgcctgtggctcctacggccgctccctgggtctgtatgcctgggatgatggctcccctctcgccttgctgggagggcaccaagggggcatcacccacctctgctttcatcccgatggcaaccgcttcttctcaggagcccgcaaggtaggggtcacaccctgagagcccaaagcagctgggcagcggggcaggagcagggatgtagtctgcagtgtaggggaatgggtggggatggggaaaaaatcccaagctgaaggagtgcctggagaccccgagggaggcagggacatccagggctttgggggtgactccaggtcctgttccttgtctccaggatgctgagctcctgtgctgggatctccggcagtctggttacccactgtggtccctgggtcgagaggtgaccaccaatcagcgcatctacttcgatctggacccgtgagtggctgtgactccttcctacacagggccctgataagcctaggaatgccagagcccagctgtagggtcccagtccctgggtgtgaggggttcctgccccaggggtgaggcctctgccagcaaatctctcctctctctcgcaggaccgggcagttcctagtgagtggcagcacgagcggggctgtctctgtgtgggacacggacgggcctggcaatgatgggaagccggagcccgtgttgagttttctgccccagaaggactgcaccaatggcgtgaggtcctcagttcaattccagagatgttggggcttgggttggggagggaggtgaatcccagagggagcaagtgtcctcactgaaggcactgatagaccctccccatctctccctcagcctgcaccctagcctgcctctcctggccactgcctccggtcagcgtgtgtttcctgagcccacagagagtggggacgaaggagaggagctgggccttcccttgctctccacgcgccacgtccaccttgaatgtcggcttcagctctggtggtgtgggggggcgccagactccagcatccctgatgatcaccagggcgagaaagggcagggaggaacggagggaggtgtgggtgagctgatataaaaaggtttttatgatactagagtcttcgtgtctgttttgggggggcatatgagtgaggtgggggaccaggcagggggactggcgggctccctggtccagcagcagtgggtatggcatattggtcctgaaaccaggcgttgagaggtgggaccaggcaggagccaatggggcggctgagcttggtgtgaagtcaagtgggtgggggtggggcttcatgccattgactggttggttgctaggcaacttggtaaactgaagggggaaacctgtttgaaatctcactcccaaggtgggggcggcaggggtcagggtgagcggggctgagcaggagctgggtcagactgttgggtgtgaccgtgtgagactgtgcagacagtgacagggcgcctgtcgcccacactccacactgtttgccattctccagcagcatggggaccattactcagctctgaggggagcaggagcactctcctccgctccccggggctccccaggaggcagacaacccagttgccagagtcaaggacacacataaaagagtaaaggtgttgaaaaatacagtcgtcacctttgatattgctgttccatgcggggcgcggcgagggtcttattcattcagcggctgtcgctgggcttgtttctccatttgtctgctctgtctttgggggtgggggacgagtgtgtcatttgaagcagtgactcctccctcctccccccaacaccttcccaaacactgagaatggggggactttgaagaaatactgccagcaggggatgtgattttggacctcacaatcaaagggaagggacgaaaggcctggggaggcttgagagggagaggaatgtcacccctgcccagaggtgctgaaagccagggctcttacacccgaaaaggcaactcctcccttcccccaggataattggaaacagcccttcctgcgcagcgccggtttggggttgtaggtacgccccttcttctcccagccccgcttctccccccagccatctaggaaagacccaagtgtatcccctaaactcttgtttttcactaacccccaggtaacaacagcacttggtccatggagcagtgacaaaagagaccccaagagtgggaggtgcgcagcctgggtttggtttctagctttatcccagacttcctgtgtgaccttgggcaagtcacggggcctccctgagcctcagtttcctcatctctgcaatgggatcgttagctctgcccctcccacttcacacaggtagtcgtgacgatcagctccgccgcactttgtaaagcgccaagccttcaaggttattattattctctccaaacctgccgggagcagcggtgttgttttgggatggaggaggaggctgcgggagcgaaaggggtgggttcctcggggtggagagggcgagagcctttctggattcgagagaggaagattccagcagcttgggcgatcggagggcaggaggggagccgggcagaactcagccggagccagaggctcggagagacaaagggggcgtgacagcccgcgccgggggctgaggcggggcggcgggcgggaggtgcgcgaggtgagggaggtgtggggggcgtgggccgcgggatgctgccgcccgctccgcctcgagctccagctccggtttttccctccaccatcctctgcccctccccgcctctcctttaactcccccctcctgggctcgggactggtttcctcccttagcccgctgccctcaatcccagcgaggctggggctccggctcggcgcccccttcctcgctccctggtccggcgccccatgccgcccccgcccggtccccggctcccccagtcccccacttaggcgggctcacagatcccggggtgctggcgcgtgggccgggggcgcgtagggcgcctgcagacggcccctggaagggctctggtggggctgagcgctctgccgcgggggcgcgggcacagcaggaagcaggtccgcgtgggcgctgggggcatcagctaccggggtggtccgggctgaagagccaggcagccaaggcagccaccccggggggtgggcgactttgggggagttggtgccccgccccccaggccttggcggggtcatggggcccccccattctgggccggggggcgtgcgagtcggggccctgctgctgctgggggttttggggctggtgtctgggctcagcctggagcctgtctactggaactcggcgaataagaggtgagtggcctgcggctggggagatcccagaccctagggcagtgggtagggaagctctgggggcttggaggcgggcttctgtgggcagggaggaggcgggagggaaggtgctggtgctctgatgtgtgatgggttactagacaggtgatcttgggagccagactccgggtcccacgcagagctggatgcgggtggtgctatggatgtcaggagtttggagaccccaaaggggcaaggagaagaaagttcatgggtagccgggagggcagtgaggtgggtatttggatctgtgggaggcctgcgtcgggggctgggcttggagggagcctggttactgtcagctctcaggagagagctgcagattaggtgctgcgagtcgctgaggggaaggcagggcagggtgcctccctcccccagagggactgcgcatccgagatgggaggcaagggggttccgtttgggggctctggggacaacttccccaaggctccttgactctcttcacagtctgtctcccaactcttccccacagccagagggtcagtgaactgttggctgaacgatttcccagccagaacatattcctgccttcctggcttgccggcatcttgctggaagaagcctggagccccctgaaccctccttccttcccttttgcatctggaggactccattgccccctcccccaatctttgctgcaaactcttccatcagaccctctgttccatggcatgccagctttgctctgaaaagaggccaggggtcagatgaaacttcaagccacgctgggtaggacagaaccttcgggaggtcacctgggtcccttgcctacatgcggatcccacttcccgctcataaaagagttctgtgttttgaaaaattcctacttccctggggagactgtgtgaggccatgggaagggggtgggctttggagctcatcaaatctttggtcttaatcctagctctgccgctttcagctgtgtggccttgggcatgtcacttaacctttctgagtttgtatcctcaatccttacagctattatgaggattagcggtaaggtgtttgaatgtattatgtgctcattaaaggagagctaggattattgttcctctctttacttcccagcctccctcacacttctctgctctgccatccctccctctcttttccctggatctctttgggtataatctcaatgtcttttctgtactcagtcacccacctgccaactcccagctgcaatgtgagtatcaggtgtgtagcttgagaacataagcttgttttcacagggtagagaaaagggagttagggtgtcctgggggctctttcggatgtggggtgggagtgggacacttgggagtctgggaagatatcaagtagcagtcccctgggacccagtcctgagaccctgtctcagcagctattgatgtccaggaaggggctgcaggggttggcaagttgtggctgtgctgggacagtggatgcctgggtgcactggccaaggagatggtgaagtgtgttggttgtggttagaaaagtcaactcctttcctttccaaagcaatagagcacttgccccagaagtctaagacccagtgtgggattctgagtgggagaatgactcaggcagcaggttcctagaccctggttcccatcagccccaatgatggtcgtggccaaaccaggcatttgccttctgtgctattagctggctaacttaggacactggtctggaccaccctccacacagcccctccctgaaccgccgccccctttgcccggaaatccctgaaattcagtggtggcctgaaggaggggaggctctgcccgcatggttggctgccatggaatagtgaaatcacctgggaggggtgggctgtgtggttccagagaggccagctccttggtaactggcatcctgttgccatggcaacggggctggtgatggagcgggagatggcggtgtgcatgtggtgagggcgggctgaagagtggagtgcatttgggcacaccaaggggcaggagacccctgagcctggcttcctgctgcttccaatgtgaatgcacagagtccttggtgcctgctctataagaagagactttccactcagacaaaggcgggcaagcgtgagctgagaattgctgtcctggaaggttgtggggtgagggaaggaaagttctgggggccaggcctctgacatctcttccttgtccaccttaccctcctccccataggttccaggcagagggtggttatgtgctgtaccctcagatcggggaccggctagacctgctctgcccccgggcccggcctcctggccctcactcctctcctaattatgagttctacaagctgtacctggtagggggtgctcagggccggcgctgtgaggcaccccctgccccaaacctccttctcacttgtgatcgcccagacctggatctccgcttcaccatcaagttccaggagtatagccctaatctctggggccacgagttccgctcgcaccacgattactacatcattggtactgctgggcagagggcacgattgagtggggggctcctgatactgagcagagagggagggggacccctgcagccaagagggagatcccagtgccctcaggcagtgttcacaccagggtgtggggccagaatcagggctagattctggagtgccaacctcttcctctggcttttctctcccagccacatcggatgggacccgggagggcctggagagcctgcagggaggtgtgtgcctaaccagaggcatgaaggtgcttctccgagtgggacaaagtgagtggggctgggggacacctcctgggcacgaagggacgttggggcagtacgatcatggttggggcagttgtctcagcccctctctgggtcttcctcatctccaggtccccgaggaggggctgtcccccgaaaacctgtgtctgaaatgcccatggaaagagaccgaggggcagcccacagcctggagcctgggaaggagaacctgccaggtaggaaccaggggctaggcccctgccttccccagcttcctctgctctcagaccccagctgccctgccgtcaccctccctccctcttcagttttgggggcggtgatacaggaaagaggagaagagaggatgggagggtgggaggggaatggaaaccaaatgaggaaaagactcaattagaactaattagccaagtcagtgcttcaatcagtgctgtcagagaagtggggaggactccgtggcaggaagctgaagggctggacacctggattctgagcagagttcggagggggaggagagatggggtccccaaggggcctgggcgctacaagggaagcccatggggacccccagggttgggtgtccaggtgcccaggtggctccttcagtccctccccctctttcctccttcaccccttccctgccaggtgaccccaccagcaatgcaacctcccggggtgctgaaggccccctgccccctcccagcatgcctgcagtggctggggcagcaggggggctggcgctgctcttgctgggcgtggcaggggctgggggtgccatgtgttggcggagacggcgggccaagccttcggagagtcgccaccctggtcctggctccttcgggaggggagggtctctgggcctggggggtggaggtgggatgggacctcgggaggctgagcctggggagctagggatagctctgcggggtggcggggctgcagatccccccttctgcccccactatgagaaggtgagtggtgactatgggcatcctgtgtatatcgtgcaggatgggcccccccagagccctccaaacatctactacaaggtatgagggctcctctcacgtggctatcctgaatccagcccttcttggggtgctcctccagtttaattcctggtttgagggacacctctaacatctcggccccctgtgcccccccagccccttcactcctcccggctgctgtcctcgtctccacttttaggattccttaggattcccactgccccacttcctgccctcccgtttggccatgggtgcccccctctgtctcagtgtccctggatcctttttccttggggaggggcacaggctcagcctcctctctgaccatgacccaggcatccttgtccccctcacccacccagagctaggggcgggaacagcccaccttttggttggcaccgccttctttctgcctctcactggttttctcttctctatctcttattctttccctctcttccgtctctaggtctgttcttcttccctagcatcctcctccccacatctcctttcaccctcttggcttcttatcctgtgcctctcccatctcctgggtgggggcatcaaagcatttctccccttagctttcagccccccttctgacctctcataccaaccactcccctcagtctgccaaaaatgggggccttatggggaaggctctgacactccaccccagctcaggccatgggcagcagggctccattctctggcctggcccaggcctctacatacttactccagccatttggggtggttgggtcatgacagctaccatgagaagaagtgtcccgttttgtccagtggccaatagcaagatatgaaccggtcgggacatgtatggacttggtctgatgctgaatgggccacttgggaccggaagtgacttgctccagacaagaggtgaccaggcccggacagaaatggcctgggaagtagcagaagcagtgcagcaggaactggaagtgccttcatccaggacaggaagtagcacttctgaaacaggaagtggtctggctggaactccaagtggcttagtctgggggatcaggaggtgggaggtggatggttcttattctgtggagaagaagggcgggaagaacttcctttcaggaggaagctggaacttactgactgtaagaggttagaggtggaccgagaaggacttttcccagtcttcagtggcacttcccaagatctcccttcccttgtgctctgtgctgattttaggacagctaagatgactgccatgtgctgtggcaggcctaatttgtcttgttctttcctttccatatcccagtataatctctgttaatcaacaggactaccccaagaacccatgtgctctcccgagtaacccagatggctgtcttgttcattccatcctacatttctgactcctttcagactcaacacagttcccttcttagtgaccaaaatggtggcctactggctggtctagctgacagtggtacttagcaaaggccactgtttccatagtgaccagctgatacctcttcctgccctctagtgtgcaattgggtgttgcctcagtttcctcccagctcagttttattagatcaaagctgttgttgggcaccaggttggccacctcaatcaccagccaagatggttgctttgtccaccagaggtcaagttcacctctctggtgctgtagttcccagctccttcctgatttttctaatcgctccttctggggaacaggaagttgatattgccatggtggcggggtatgccgtcacctcagtagttttactgtaaaagggaaatttgaacaacaaaaaccaaaaaaaataaaaataaaaaacttcaaaagttgacaagaaggctggagaatgactggacttgaattgggacaaaggcttggttagaatggctttcagctgagggttggattgcatgaaaccaaccaaggggggtgggtagggatagggctagtttggagtggtgaggttggcagtgcttggggaggcgaaaatgggctgggcgagaaggcagaggaaggtgtcacctctaggggagggagagagtaatgcaggcaggagtggggtcgccaattcatccatggggacagtctgagtgtcttgctaagccaaagcaccagagacagggtaagacgcaattaggatcaaagtggtaaaaacatgttcacatgttaaagtctattccctaccatccctacccaaggcacttgagaagttttgctgttggggactcatggggagaagggatgtggctgatcagaaggaagtaggaaggactcagggagggacccaggcatcaagctgcgtgtgccctggctccctgtatacccataaccgaggctcttctcccccaaaaagcccaggtgcccagtcccctagacttagccccattctccaaccacaaaagcagccgtcaggagcatcactggagcgagtcagcaggggtcacaacctctgccctccctgcccctcccctgactttaggtcccctcccgctgtctcccatctgtctggaggtcaaggggtccctcttcctctcttctgtccagtgggacccctgctcctccccctccccgtctgagcaagatgcctgggtcttgagaggtgcgggcaccgcaggaggggagttgaaagctgggaggccaggtactgggctgtctggaatttactcttgccttctgagcccacactggagctgcccgaagtggggaggctcgtagggggtggaaaggctggtccttgccccttagtgggggttggttgtcatggcaacatccccttctctacacaatgggaagcccccctcagcctcccgcgtggatggagccgacagccccatcgctggctatcagcctcagggacttggcaaccgtcactatggcaacccagagcccagcaacagggcccactgagaaagggaggggtccaagactggggcagggtggtgtgtgaggggcaagggagatcagggagactccccctccacctacatctagaggcacaggtggagagacaagagggaagagacgtggggataaatagtctccgtgacagacaagcacctcgccaaagcagccaagacatcataacatgctgagagacaggaagacacctggggacagatgcacagccagggagaggaacagcacagactgcacagcgcctgggacacgccccctcagagcgctggcatccagagactccccgcagccccgctcgaatagcacaagaccaacagcctttcacatgtgtagtgacttgggtgtctggagctatttgaaaatgctggtgacttccacgcagaataacacaggccgtcctatttgctttgtggggacaaatacacacacatattcctagagtaacaactgcaacaaaacaactacagcaaaacgactacaggcacaggaagacatttgtttgttcattggtttgttcgttcactcgctcagcagcatgttaaatgctactttgtttcaggcaccggttcaggcgctgggaggacagggtgagtaaggccaggtccccgctttcacaaagtccacatttaggtggggaacgaaataatacaatttcaggtgtgaaaagggatataaacaaaacagaatgacaggatgaggaggatggagagtaaccaggagctgctttatttatttattaatttattaatttatttatttttgagatggaatcttgctctgttgcccaggctggagtgcagtggcgcgatctcggctaactgcaacctccacctcccgggctcaagcgatgattgtcctgcctcagcctcccaagtagctaggattaacaggtgcccgccaccttgcccagctaagttttgtatttttagtagggtcggggtttcaacatgttggccaggctggtctcgaactcctgaccttaggtgctcagcccaccttggcctcccaaagtgctgggatgacaggcatgagccaccgcacccggcctggagctgctttagatgaggaggtcaggaaggtccctttgaaagagatgcccttgatcaggaccttaagtcatgagacaggagtaagccatgcacactggggacgggcatgctagacagaggaacagcaagtgcacgggcacagaggtgagattgtggtgtgtttgggaacagtaagaaggacatcaccaccacatgcatgtttcggatgtgtcctgttcttccctagcctcggcctggaggggagtaagtcacttagggtcttggatccacattaaggaagttgatctcactcagtctcccatccccttgccttttgtttcttgtgtgtctgtgacttgtgttttcctcgtctaaattttaagctctgggagggcaaggatgatgctctgagcttttttgggggctgtggcacagctgctggcagagtccagagcaggaaggcagagcggaagtaaaggaaccgagagggctgggaccacagaagctagagctgtcgccctgccatccccaaaccgcataggattgaggctgtcttggggctgagctgtagagtgaagctcaggctttgccctccttccaaataacggcagctgagggatactattcagcccgaggtgcgtgtgtgtgtgcgtgtgtgtgtgtgtgtgtgtgtgtgtgtgttgggggtttttagggaaaggggaatggggcaaggagtggcagtgggaatttcttttctttttcttttctttttttttttttttgagacagtctcgctctgtggcccaggctggagtgcagtggtgcaattctcgtgcctcagcctcccgagtagctgggactacaggcatgtgccaccacgcccggctaattttttgtatttttagtagagatggggtttcaccacattggccaggctggtcttgaactcccgacctcaggtgatccacccacctcagcttcccaaagtgctggaattacagatgtgagccactgtgcctggccttgcagtgggaatttctgatgcggaatggttgacatcatatctggaattttaattagaatgaaaaatggcccttcctaaggggctatatgggccaccgtggacatggggcttgggagagttttgagacctgggagaaatgtcacacggtggtttggaggcaggaggctgtctggcataggctcagagttgggtgggggaaggaaaagggacacagaatgaatgggaatgacaactgggcagccagagagctacttgaaaggtagcagggaaagtggagttctgaagggagttctgaggggaccaggccccaggtaccccaattcccacagggaatcgaagtgttcagttttctggttctccctcttcctccagttgccatcagaaactcaggcaccgcaaccccagtggctggcggggtgatgtcggggggagactgagctgcttcagggggtagcagctggtgagttgggaggaatctgtgtgctcagcaaacagcagcctcagtgcccggtggctgcctcctccctcatcaatcagccccagccaaatgtccttgcattcccaccaccccaaggggactggggctgggccagggtccccaggggagatggggatgggtggggggaggtgaaggggggtgcttggcttcctttcccttggcctctgttctcttctgtcctggaagctctcagttcttcatgtcatggaatgactatcctggcccctaccatcgtgggggcatcagctacaaatcacctgtggggggctgctgggggagaaggatgagtcaggctgtagagtaatctactctggttctcacgggaccagcccagggcacagccggcagggaggctgctggcatagaggccctgtctcccctggcctctgtctctgatgaatgatccggacagcaggccgagaccctgacccctggaatggacctctctttccaccttctcctagcccccagtcctcatcccctgcttccagccaagatccagaggtctggcccccagctcaccccaaatctgctgttccccactagggactggggtctctagaccttagcctctggctccctttccccctcctcagcctttgctcccctccgggacccaggcgtcctgcccactcccttcaccataacaaccattcttttggagttgcttaagactttaatatcatttcattaagtcagcaagttcagagaaggttgggggcacaaagagactgggggtgggcaaaagagggccaaagtaggggggaggcaaggaaagatcccccacccccctctccgtggagatggctctgagaaatcaaatattgacaatgagggaacagaacttattaaatctgggacagggatgtgtgtggggagctgtgggaatggccggatgcctgggttcggagggtaatgaaggttctgggaggaggaaaagggccgtggctgggaggtgcagcaaggctgaggctcgaggtcacaactcttctgccctttcctttgggatgtacacggtcttgcaaccctggctgtttctctagccccgaagagcccctggggaaaagacccccatcatagctagctgtggttgccccgccttcgtcccttccccctacctccacctctgttgatgagcttcagcagcgtttaatcggattgagcagtaattagcaaagcgagatgtttgattacctatttagcataatgtggggggctgggatccgtaggcacagccacagttggggaggggggtttaagaaaagaaatggggtctgtgcaaagttcctttccccgagggacccatgaaccttgcccctgaggctccccaccccacgcctccagcaaattttcactcctttgggacttttccctaggggttctggccaaccacatcacctctgtctgccacccatggcctatctggctagaggaacacctccacgttccatcttagctgtgctagctgtgcagctggttttggggtgggcggtactcctctccttccattcctgctgtcagcaacaggagtctggctgggcaggaggaattattgggggtcggggggagggaaagggttgacacttctgggaataaagatacggtaggtgggagggtgaggtcagcgctgggatagggtgtggttaatccacttgctcttcaggagtaccagggactgccactcctggtagtgccaggctggcataatgagatctgttaggtgtgaacgccaaacagaaaatgggggaactgaggtgccagcttctcttctcctcatccagcaaagaaaatgtcataaatttcgctcctcatggaaatgtaatcagtgggctcgctgctggctttgtcttaattaggcactattgatggaaacagggagggcgccttcccatccccccactcggcttcctccctgtatttcccaggtctccccaaagctcctcccggcaccaggtacagcggtcttccaggcgccttctagcagccccggcccgcagcgccccctggcaccctcggagatgtaccccggccctcatagccctcccctctcgcctcctctctcacgacgcagcctttgttcctatggagagcgaagcccctcccaggcccggtcaccttccccagggagtccccgcctctcatcccccccaaaaaccagcgatgccttcgaaagccaatcctcagattcccaaaactccagttcccgtcttccctccctttccccgccccgcgccgcccccccgcaatcctagaccccaatccgaactaagaagggggaaggagcaggagggcaagggtgctccaggcccggtttttcccccggatccagctgcacccacggctgcctggaaatcctggaacgccttctacatcgcgaatatccctcgccggcctggcgcccggcgccatctgctggacccgttccggctggggcgcacagacctgggcgcggggtcgggcgattgggttctccctgccttttcaatgtcctgcggggcggtggctcactgtctctcgccccagcccttccagctgggtcctgacaccaggccccccgcacccttcggctcgccagatgtggctactttcctttagtcccggagccttcaagccctgggtccctgaggggtagacctgggcggggtggggccgcgaagcagggatccagggcgcctgcgcggaggaggcgggctccgaggggccgcacaccggccactcgcccctccctgcccggggttgccatggggacgcgtgcagacgccggcccgagagggctgcgaggggcaacttcttagagtggcccatcggtcggtctagggaggggagggtcagcgtggcaaggtgtgtgtcgggggcagagggaaggagggaaggagtgctggggagaaggggcagtagtgtcggggtaggaagggacagttgttggggagaagaggcagttgtggagggagagggagcaaggaatatttgtgtgggggagggggaggagaaggggcagttgtgacagctgggggggaagagccattctgaggggaaatttgcctgctggtaaccagtttaaggataccagctgctggtataaatactgctggataaatactgctggatttatactgcaggataaatactgctggcccctgcggtatttcctagtactagagtgagccccgacttagcagagcagttcctcctggggcctgcggtgtgggatcgcgtggtgaaccccacggtgcatgcgcctcaggctctagtttgaggcaggaaagcgcagcttgatgcttctctggagactgatggaggaagcctccttgctgtagttggttttattgatttgctggcctaacagaacgtttttccttggagcaaagtacaaatccttcaagtttgaaattcataacctgagatcaatgcctgtggcagcctgtggggatgaggaaggagagccacaggtgccgttaggctgcagcctaatgaaaagagagtgcccagcgcctcagactttgcgcctgggattctgagcacctgtccgagatccccgcttcctgccatcctacctttctgagagaggcaccactgtgaccttcctcgtgccccaattgctttttcctcatgacacaatttgaaatttatgattggatgacttttgtccttctttcttccaatctgttctcagggcattttgagtcaaataaatgatcctgactgatcttaaccattagcacagagttcctcagccaactctgctaagagacctcagtacacacaaaacagtgttcctgcccctcaggacttcaaagcgatagacccaggtggcaaatactgtttttctctgtttacagatgttgcagattttagtgggattgggaggagcatatttccatttaacttgggaggaaaagaggtacataggaaaatcatcttggtttgcttgaatgattgaacagtgacaaaggatgggggatgtgcaccccttccttgatcctctctcactcactcatggtcctggagggtagagtggatgagggtttgggcaaccacacttcagcttgatagatcttttcctgattatcttatgttctcataccccggggcagagatagaggttctaaatcctcattagtggggtgtctggccatcttttttttttttttttttgagatagagtctcactctgtcagccaggctggagtatagtagcatgatcttggctcactgcagcctctacctctcgggttcaagagattctcctgcctcagcctcccgagtagctggaattacaggcacgcaccaccactcctggctaattttttgtatttttagtagagacggggttttgccatgttggccaggctggtctcgaactcctgacctcaggtgatccacccggctcggcctcccaaaatgctgggattacaagcatgagccaccgcacccagcctggccatcatctttaactcccatttgttcctagtgccttgagggactgactttgatttttagcccagtgccccgaagacagtaggatatcctagggaaaaacagcaaggcctcccaggcccctgtggagtacagagcccttgtggttaatggagcagggtgtgggtaccaccagaaaagatgatcatattgagtttcagtcaatttatgaattcaaaagggactgcttgtatcagggggctggttcaggggtggtatctgcttgtagactctccactcctgtatacctgtaggttttgcctgcacgatgtccagcaaagctgagaagaagcagcgattgagtggccgaggaagctcccaggcaagctggtcagggcgggccactcgggctgctgtggccacacaggagcaggggaatgccccggctgtcagtgagccagagctgcaggctgagctccccaaggaggagcctggtgggtacttgctggggcagaggatgcttagcaatggagggtggggaaagtcagaggggcttggaggcattttagggctggggagcaggcgctgttgcttctgggcaggaaacgggctaagtgacgcccccagccatggaggttcagcagccctgccactgagtcctttttttgtatgtcttcctcctggccagcctcatccttgttctttctgtcttaaaatttcccacaatataccaggagttcaccaaccagtcctttctctagcctcttcctccttatttcaagtgttcctggttgctcctaccccactgaagagggtttgatctcttcctttttcccattttcaccctgggtggcaaaacaaataatgtttttctcccattaagcccatcaccatggagactcagcctgttttgccaccctttgaatccaaagcccggctgatgctttctaccatctgttgagggctgttctatctccgccctcattttggcagggacttggtagactgcggaggttcaggttcaggatgacaggaaagaagtctagatctagggaggaaagagtttaacgaggcagcctcttgtggctttgacctgagggattcctttcctgtgggtgagccggagccagtaaggttggaaggtttttggtagttgttgctattgctgggatctccctgagagcactggtcagtgtagacaggactatgagctaagtgtagacctccttctttacctggagctcctttacactgatagtagcttgtgaaatagaatccccttctaaaattaaaggttgagaggttaagcgtgggcatgggagaaaagtccctgggccataagaacttgcattaggttccaggatcttagaaatgtgcagaatgtatccttctgagttctgaagtgctcaggtgaaagcagttaaaatgggattgctcgctgctaggaggagtaggggaagatgggagggaagacagtgaggttcagtatggagaatcctctggggaggtaagggaaggagctttaaaatgaatgtgttggccttcgaacagcaaggatttctgcctctcccagctccaagctttcttttctttctttcttttttttttttttttttttttgagacaaattctcactctgtctcccagcctggagtgcattggcataatctcagctcactgcaacctctgcctcccgggctcaagtgattcttgtgcctcagcctcccaagtagctgggattacaggcatacaccaccatgcccagcttattttttttatttttttgagacagagtctctctcagttgccaaggctagagtgcagtggtgcgatctcagttcactgcaacctccacctcctgggttcaagcgattctcctgcctcagcctcctgagtagctgggattacaggcgtgtgccaccacacccggctaatttttgtatttttagtagagatggggtttcaccatgttgcccaggctggtctcgaactcctgtcctcgagtgatccacctgcctcggcctcccaaagtgctgggattacaggcgtgagccaccgcacccagtctcccctggcctagttcttgcctggaacctgaatgccagcagttttcccaagggagttggatcatctcacctactcacctactactaagctccggaatcgcctgttccatcttttcacgccttcctgcctcggcctctgtgcctcattcccctcttagttttcctttctggaagccagagggagtttcctgttcctcatggtcttttggttatatctcatttgttccttcctcctttcagcccctggggaatgggaaagccaccagttttactccaatctcctgtgtgactagtagatcaggaggcagagaaacagagccgctgggttttatgggagtcagagtgggtgtggcagaactgaatgctcagcaggccagtggtttggagaagggctgattcctatgagccccaacttctccatgtgggaagaggagtgggggaagatggagggccagaagctgtatgcctggaataacctcagtactaaccgccttcattccctcacccctaccccagttagtgtttgttttatttttattttttggagacagaatcttgccctgtcacccaggctggagtgcaatggcgtgatctcggctcactgcgacctctgcctcccggattcaagcaatcctcctgcctcagcctcccgagtagctggaattacaggcacccgccaccatgcctggctaattttttgtatttttatagagacgggggggggggttcaccatcttggccaggctggtctcgaacgcctgacttcgggcgatccaccagcctcagcctcccaaagtgctgggattacaggtatgagccatcgtgcccggcccccagtcagctttttacattaaattgacagagaattcactgactctaaaatttacctttttaaagtctacagttcagtggtttttggtatattcacaaagctgtgcaacgttcccactatctaattttagaacatttttatcccgccaaaagaaagccactttaagcaccttgagaaattggcaccaggtgactcctatatctttacttgtaagttgcatcagagcctcgtcttttagcagtcactcctgattcccccttcccccgcagatcccaggaaccgctcatctattttctgtctttatggatttgcctatgctggacatttcatcgagtggtctctcatgactggcttttttcacttggcactgtgttttcgaggatcatccatgttgtagcatgaaccacaccgccatgccttctgatggctgaataatagcccactgcatgtttatatcaccttttgtttatccattcctctgttagaagacactgagctgttgccaccttttgcctattgtgaataatgctgctacgaatgctgtaatgcaaatctctctttgagtccttgctttcaaggtctctacctagaagtggaattgctgggtcattgggtggctgtgtttagctttctttcttttctttcttttcttttctttccttttttttttttttttttttttgagacagagtcttcgctctgttgcccaggctggagtgcagtggcgcaatctcggctcactacaagctccgcctcccaggttcacgccattctcctgcctcagcctccagagtagctgggactacaggctcccaccagcacatctggctaattttttgtattttttagtagagacggggtttcaccgtattagtcaggatggtcttgatctcctgacctcatgatccgcccgccttggcctcccaaagtgctgggattacaggtgtgagccactgtacccggcttttttttttttttttttttttgagacagggtctcactctgtcactcaggctggagggcagtggcacgattatggctcactgcaacctctgcctcctgggttcaggtgattctcctgcctcagcctcccaagtagctggaattacagacacccgccaccacacctggctaattttgtatttttagtagagacggggtttcactatattggccaggctggtctcaaactcctgacctcaggtgatcctcccgcctagtactcccaaagtgctaggactacaggtgtgagccaccgcgcccagctgactgtgtttaactttccaagaaatgccttcctttttgtatgtttattcttcctagagccacggttggagggacctcaagcacagagtgaagaatcagtggagcccgaggcagatgtggtaggcttgggtcttccctgtggcagatattcctcccccaaaactggtgaatcaaaggatcagttgtggatggcacatgaggaattctctcttgtctgccacttcttctacttgctctctgctgttagcctactcaccacaaatccagttcactgagtaaaagacaaagtcatctgtgccttcgccaggacagaggagggctttaagtaaggcgcaggtctctcttgtctccccaccttgggtcaaactgtgatgagcttattcatcatgcgggtgaacacctgaacaagttgaatgagctgggaagatattgtcctaattggatactaatttctaagacatgctctttccacctttccttcagttctttcctttggctgaagaatttacagaagctgcttcagtcactttgagaaatggcactaaatgacctctgcttctttatttccaagttgcatcaaagcctagtcatgaccatagttacctgggtgagaagaatagagtgatgaccttgacatttttcaaaaagggaaagaaaagtaataactatcgaagaaaaaaatggcaagagacagaaaagtaaaatagagaaaataagactcatggtgttactgcccaaacacatttaatattaatatttgatatgtctggccagacacggtggctcaagcctgtaatcccgcactttaggatgccgaggtgggtggatcacctgaggtcaggatttgagaccagcctggccaacatagtgaaaccccatctttactaaaaatacaaaaattagcagggtgtggtggcggatgcctgtaatcccagctactcgccaggctgagacaggagaattgcttgaacccgagggcagaggttgcagtgagccaagatcgtgccactgtactccagtctgggcaataagagcaaaactctgtctcaaaacaaacgaacaaacaaaacccaaaaaaacaaaaaaacaatattttgatatatcttttacttttgtgcacaggtttgtaagtttgtttgtttttgtataatcctaactttatcatatgttactttttttttttttttctgagatggagtcttgcttccgtcgagcaggctggagtgcagtggcatgatcttggcttactgcagtctccacctctggggttcaagtgattctccctccttagcctcccaagtagctgggattacaggcatgcaccaccacgcccagctaatttttgtatttttagtagaggcggggttttgtcatatcggccaggctggcctcaaactcctgacttcagctgatccacctgcctcggcctcccaaagtgctaggattacaggtgtcagccaccgtgcctagcccatatgttatgattttgtattaaaccttttcacaaaacattttatttgtattattattattttttgagacagagtcttggtctgttgcccaggctggagtgcagtggcacgatctgggctcactgcaatctccgcctcccaggctcaagtgattctcatgtctcggcctcctgagtagctgggattacaggcacacgccaccatgctggggtcatttttgtatttttagtagagacggggtttcatcatgttggccaggctggtcttgaactcctgacctctggtgatccgcctacctcggcctcccaaagtgctgggattacaggtgtgagccactgtgcctggccttctttgttattttatttgtatttgacttcaagtgaatatatatatatatattttctttttgagacagagtcttgctctgttacccaggttggagtgcagtggcgcgatctcagctcactgcaacctccgcctcccgggctcaagcaattctcctgcctcagcctcccgagtagctgggattacaggtgcatgccaccatgcccggctgatttttgtattttttttagtagaggcagggtttcaccatgttggccaggctggtcttgaactcctgaccctgtgattcgcccccaccccccacccccactccggcctcctgaaatgttgggattacaggcatgagccaccacgcctggccaatttttttttatatttgcatttttaaaaatgacatatctatgcaggtccttttgtctatttgtttattgagtttttagtgtttttcttattggttcatcctgtctatatgtattataggaaagattttagatcactattaatttttcttgacctggaaactttaagagagattccttcttccaggaggaaagatgaaaagacttcgcaagttcactgatctgtatcttcatatcttctgatttcctttatttatttgtttgtttatttatttttgagacggagtcttgctctgtcgcccaggctggagggcagtggtgcaatctcgggtcactgcaacctctgcctcccgggttcaagaaattgtcctacctcagcctcccaagtagctgggattacaggaacccaccaccatgcctggctgatttttgtatttttagtagagatggggtttcaccatgttggccaggctggtcttgaatgcctgacctcaggtgatccacccgccttggcctcccaaagcgctaggattacaggcatgagccaccatacccagctaattttttttttttttgagacagattctcactctgttacccaggctggagtgcaggggtgtgatctcggctcactgcaatctctgactcctgggttcaagcgattctcctgccgcagcttcccgagtagctgggattacaggcatgcaccaccacgcccggctaattttgtatttttagtagagacaaggtttctccatgttggtcaggctggtctcgaactcccgacctcaggtgatccacttgcctcggcctcccaaagtgctgggattatagatgtgagccaccgcgcccagccctctttggtgtttttgtgtctttttccctcctcactttttccttaatgttgtaccaattgacttttacctagtattttacacttcttttggactccatcgtgaagaaattgctcctataccctctcccttttccagcttgtggtctccctgctcctaattgcttgatctaggctaatatcctacacattcccttaattcacctttacctttgagatcgagggctgacatttttaaaaactacaggcataaagataatctcttgcattgggtggataatatcccagttttcctctgtgatctgtttgtttgtttgtttgtttgttttattactcttagaggcaagaaatcttatttttctgtttcttccaaagctggaaagctatctttcagtttctcctaaccattctgaacctgtctggcttctctcatctcccatgtcctcacttgtgattgtggatgggaggaatgactcatcctggcagttgtagttactttggccctctgctctccttctgtagaagcccctcttcctttcccgagctgcgctgacaggactggcggatgcagtgtggacacaggagcatgatgccattctggaacactttgcccaggaccctacagaatccatcctcaccatcttcattgacccttgttttgggctgaagctagagctgggcatgcctgtacaggtgcgtaccctacattcccagatcaaaggtggtcctacagagagccgagggctctcagttccttcatcatccttaagtcttgtcatctcctgtgcccacggcctattgagccccactgtgtcaggcaccctacttggtggcaaggataggaagaaggatgacgcaagaacgctgtcatgggctgggcgcggtggctcacgcctgtaatcccatcactttgggaggccgaggcgggtgggcggatcatgaggtcaggagatcgggaacatcctggccaacatggtgaaaccccatctctactaaaaatacaaaaattagccagacgtggtggtgcacacctgtaatcccagctacttgggaggctgaggcagaagaatcgcttgaacctgggaggcggaggtttcagtgagccaagatcatgccactgcactccagcctggtgacagagaaagactctgtctcaaaaaaaaaaaaaaaaaaaaaaaagaatgttgtcctggtctagtggggaagacagacatataagcaaatatttactatagtttgtgatcatgggcaaagctttataggagcgttatgggagcaactaatggagccagtggaattctgggaagccttgatggtggaggtgctatttgagctgggatgaagggtaagtgggattccatcaagactaggtaagagctattcagcaaagaccactctacgtacaaagaaaagagaagtagtgggaagtgatactgaaaggggcttggggtcagcttatgaagggccttgtatattatactcgagaatttggccgctatcccagagagtgctattgaagtcttttatagtttagatagataactatttcaacagtgtggagaatacattagacaagggtagacctagggtagggagacagttaaaagacagatggatagtaaaatgttgctggtagaatctgggtggtggtcatacaggtcatcactgtaaaattctttgaacttttctgtatatatctttgaaaattttggaaaaaaaatgttggaaaacttaaaaggctgttgctttgctcatattggcggcacatatacaaaagtggaaaggatgagattgattggcatggccctgtgaaacaatgacgcaatttgtgaagcattctgcgttgaacatgggcagaagaacttttgccctgtgcactggcagtaatcagccacaaaacaatgaaaaaagatttcattcgcaaaaggaaccacaatttgcaaaatatatttatatttgaatatacattttaatataaaagtatgatttatatgaaggaaaacaactttgttgcaggccgtgaaaaacgatttgaagaaatgaggagccacagcttgtttcggagtaggaatcttaatatcataaagatcattttatataaaaaagtatcatatttggctcatgcctgtaatcctagcacttcgggaggccgaggcaggctgatcgcttgagcctaggagttcgagaccagcctgggtaacatagtgcaaccccatctctacaaaaaacacaaaaattagccaggcatgatggtgcacacctgtagtcccagctacttgggaggctgaggtgggaggatcacttgagcctgggaggtggaggttgcagtgaggtgtgatcacttcactgcactccagcctgggtgacagagtgagaccctgtctcaaaaaaaaatacaaaaacaaaaaacaaaagggccagttgaaacttcctttaaaaattattacccttgaatacctgataaaatgagcaaaaagtaaaactaccgaaaaattaaaaaaaccaaaccaaccaaaaaaacacaaaaaaaccctgagagtaagcaaatttaatctaatacactttaaaaatgggagaccaatgaaaaacatatgcactgagtcaaagaatggtgctcccctggttacatggagtgaacttgagagggtgtaataaaatcttagtaaagagaaagacaggcctgtgcctttagtcccagctactgtggaggctgaagccaaaggattacttgagcccaggagttcgaatcaatcctgggcaacatagcaagaccgccatctccaaaaagaaaaaaaaaaaaagagagagagagagaggaggagcctaggtttgtttgtttgtttgttttgagacggagttttgctcttgttgcccagcctggagtgcaatggcgcaatctcggctcactgcaacctctgccttctgggttcaagcgattctcctgcctcagcctcccgagtatatgggattacaggcatgtaccaccacaccaggctaattttgtatttttagtagagatggggtttctccatgttggtcaggctggtctcaaactcccaacctcaggtgatccacctgcctcggcctccgaaagtgctgggattacaggtgtgagccaccacacccggcttgagccgaggtgttttaacaaagatttttcactgccttaaatgagcactaaccacctgtccatttccctgaggcaattctcttaggccaaagaaaagtgaataaaacataaaacacccaaccctttcactttaacttccaggggcaaaaataaactggtctctcacagtgggaggtcaaatcacccacagtacattagagcaaaaagaatgagttcacatgcttgctgcccaagcacgagcaaaatgaaaagaaattgcatggtaactgcaagtgcattacatcaaagaaaaaagaggaacaaagcatgcaaaagaggaaaacataactgaatgaacaggaggagattcctcacaacagtaccatgttctaccacaacttaataagaccagggattcaattaaaaaaaaaaaaaaaagctgagccctgaaatgataaaatgtgagaataagataaaagggagactgcagattttaggaaatgaataaagcagcatgttataaaaccagtagattggaaatagcaaggaactgaatagctaacccagaaaatcctatcactgacagaggagaggcttgaggtaatcaccgtgtatgcagaagaaaaagccaaggacattaacacaattagagaagctaacagatacgaaagactaacatagatgatcttgtatagagagccaacaaatgaaacaatataaatgtaaagataaaatacaagtaatttccctgaaatgcagaaggaactgaatctgggaatcaaaaaggacacactgtattccacaaaatttgttgcacatcttggctaagctactcaattgtaggaaaaattaattccttaggaatatcccctatgcggtaatcctgctaagaatatttaacttgaatctggcaataaggagacaatccaataaatccaaattaagagacatattgggaaaagaaaactggcctggactattagaaatatcaatgccatgagacaatcgcttgaacccgggaggcggagattgcagcaagccaagattgtgccactgcactccagcctgggtgacagagcgagagtctgtctcaaaaaaaaaaaatttaaaatttaaaaagcatgagctgggcacggtggctcacgcctgtaatcctagcactttgggaggccaaggcgggtggattgcctgagctcaggagtttaagaccagcctgggcaacatagtgaaaccctgtctctactaaaaatacaaaaaaaattagctgggcgtggcggtgtgcacctgtaatcccagctacttgggaggctgaggcaggagaatcgcttgaaccagggaggcagaggttgcagtgagccaagatcacgccattgcactcaagcctgggcaacagagtgagactgtgtctcagataaataaataaattaattaaattaaattaaattaaattaaaaagaaaaagaaaatcaatgccatgaaagaaaaaggttggggagtgctttaaaattaaaggatactaagagacatgaccatgtgtgatcttggattagattctggattgggtctttcaaagcagtgagctaatagaactcaaaattgaaagttagtgagaaaactcataatatttttcataatctttttttcttaccaccatagaaagggatcctttgggaagaaacctctcttctggatgaagaaacatttatttgaagctcaggaattcctttatagctacttctatttctttttatttgcttaaattcaagtaaaattaaatttaatagttttaattaaaaacagcttgctcctatttaaaaataatgattttaatttaattttctatatgtatatagctatagaaaaatatgtagaataatgttttctctaatattaacaatattaatttttaggtggtggaattttagatgacattttaacttttatctttgtagttttctgcattgtttcaattatttatatttaacgtatgtcatcttcacaaaaataatagttgttaaacttttaaaaaaatggacatggccgggcacagtggctcacgcctataatcctagcactttgggaggccgaggcaggcggatcacctaaggtcaggagtttgagaccagcctgaccaacatggagaaaccctgtttctactaaaaatacaaaaattagccgggcgtggtggcacatgcttgtaatcctagctactcgggaggctgaggcaggagaatcgcttgaacccgggaggcggaagttgtggtgagctgagatcatgccatcgcgttccagcctgggcaacaacagcgaaacttcgtctcaaaaaaaaaaaaaaaaaggacacaaaatgccaatatttattttatttctgggtagtaagaagacagatgattattaatttcttccttgtgctttactttgtttttaaaattaaataaattgtcagccgggtatggtggctcgcgcttgtaatcccagcgctttgggaggccgaggcagatggatcatctgaggtcaggagtttgagaccagcctggccaacctggtgaaaccccgtctctactaaaaatatataaattagccaggtgtggtggtacgggcctgtaatcccagatactcgggaggctgaggcagaagaatcgcttgaacccggggggcggagattgcagtgagctgagattgcaccattgcactccagcctgagtgacaaagcaagactccatctcaaaaaaaaaaaaaaaaaaaaaaaattgccaagactagtcaaaaaagcactaaaaaacccaaacgaaacaggtgagtctgatattagggtggaaatggcctttctaaatatgtagcagtcagaactttaaggaattttatatttaattacatgaaagatatatgcttttgtacgtaaaccacaaaagccataagcaaaattgaagcatatgtgtaaaattttgggagaaatatatgcaaccaaaatggaaaaccctagacaattgtctcttccttccagtccttctcctttctgctttttccattggctgaagtgcttcctccattccatcctttctttctatcgatccgttcatccatccaacaaacattattgagcatctactctatgccaggcagtgtactaggttctggagcctagttggacaaaatgtacagtccctactctcaaggcatactctctgcatttcctccccacatctctggatatggaatcatatccgtgaaaagaacaggaagcacttcatggcacttccatttagagaaggatcaggataccctgagggacgtgagaaagaactcagccgggcttttgtgactgggtgtcatggctgggcctggagactgaactctgatctgctgtcttccatgcagacccagaaccagcttgtctacttcattcgccaagcaccagttcccatcacctgggagaacttcgaggcaactgtgcagtttgggacggtgcggggcccctatatcccggccctgcttcggctgctcggtggagtctttgcccctcagatctttgcaaacacaggctggcctgagagcattagaaatcattttgcttctcatctgcacaagttcttggcctgcctgacaggtaagtgggaagaccggagtgactagtttctccttagtgtcccccaactgtacaactagtgaagtggtgggtccttcgtctgagcacctgtgtggaggaggaagtattcagcatgcttatcgaattggtagaatagggtacaagatccgccttcttcttcttttttttttttttttttttgagatggagtctcaccctgttgcccaggctggagtgcaatggcgcgatcttggctcactgcaacctctgcctcctgggttcaagcaattctcctgcctcagactctcgagtagctgggattacaggcacatgccaccacgcctggctaattttttgtatctttagtagagatggggtttcaccatgttggccaggctggtctcgaactcctgacctcatgatccacccgccttggccgcccaaagtgctgggattacaggtgtgagccaccacaccctgccaagatccgctttctaatccagacacacttttctgttgtggaacttgttggccagacctgcttcaacttagacttggaaatttctaaaagcacatgtgggggaaagggaaatataggtgctgtggggacactgggaggactcacatgtctcgtggtagagagtgttgaaggcgcgatacagatctttgaccttattttatggcaatttcttgttataactccatgaggtttccctcttgcctttggtcatttcttgatatcaaaaaagcatgagtcaccatttcttctacctgctctcctgaaatgcatatgcttcctggtcccctaccgatcatcaaccgtgattcctacggggccagcaagaactcatcccctctgtccacttccacaaactttcctttccttagacactcggtacaaactggaggggcacacggtcctctacatccctgcagaggccatgaacatgaagcctgagatggtgataaaggacaaagagctggtgcaacggctagagagtgagtggctggcactgctagcatcacctggcgatcacaggggagagggaaaggggaggctcggatgctgacaatggagttgggttaggaggtctctgtcggggttgcggggagtgaaggatgctgttgggaagcagtgtgaagaaacgaaggagattttgtactctcccctgcagcctccatgatccactggacccggcagataaaggagatgctcagtgcccaggagactgtggagacaggagaaaatttaggtcctctggaggagattgagttctggcgcaaccgatgcatggacctgtctggcatcagtaagcagctggtgaagaagggagtgaagcacgttgaatccatcctgcaccttgccaagtcgtcctacttggcgccctttatgaaactggcacagcagatccaggtttgtgagcgaatcaaaggattcaggctcagcaagaagtgggcaatggttgggatgatacagggagctaagtaaggagagggagccaaggcaatcttcgatagcacagactgacccacccagggttcggccttgtacttgcaggagagtataaaatagtagaatagagggtccctaaggagagagacatcaagttaaccaataaatatacatcaagtaccttctgtgagcacaacccctgccacccagctgggaaaataagattacccaaaacaggattactagacagcgtgggagccaaagatgagctcatgtggttcagtccaggaattacaagataaataccttttttctttgtttgaatctgccttccaaggaaaatccaaggaaaagggataaatactttttttctttttcttttcttttttattattatttttgagacagagtctggctctgttgcccaggctggagtgcagtggtgcgatctcagctcactgcaacctctgcctcccaggttcaagggattctcctgcctcagcctcctgagtagctgagattacaggtgcccgccaccaagcctggctaatttttgtgtttttagtagagacggggtttcaccgtgttagtcaggctggtctcaaatgcctgacctcggtgatccacccaccttggcctcccaaagtgctgggattataggcgtgagccaccgcacctggctctttttcttttcttttcatttctttttttttccttttgagacagggtgctggaggctgaagtgcagtggcacgatctcggctcactgcaacctctacctcctgggctcaagggatcctcccacatcagcctcctgagtagctgggactacaggtgtgcaccagcatgcccggctaactgttgtattttttgtagagacaggattttgctatgttgcccaggctggtctcaaactcctgagctcaagtgatccacccacttcagcctcctaaagtgttgggattacaggcgtgagctacctcacccagctcaattgttaattttttttattattataattttgagacagagtcttgctctgtcgaccaggctggagtgcagtagcgcgatctcggctcactgcaacctctgcctcctgggttcaagcgattctcctgcctcagcctcccgagtagctgagattacaggtgcccaccaccatgcctggctagtttttgtatttttagtaaagacggagtttcatcatgttggccaggctggtctcgaactcctgacctcaggtgatccacccgcctcggcctcacaaagtgctgggattacaggtgtcagccacctcgcccggcctaatttttaaattttttgtagagacaggatctcactatgttgtccaggctggtctcaaactcctggtgatcctcggcctcccaaagtgttgagattataggtgtgagccaccacacctgggcaataaacattaaaaaaaaatttgatatgatgtgacaggctgattatgttagtgctaggtcacacaggaggtaagagtggcctgtagaatacagatagaagacctgtcttcctaggtgaaaatttcagctgggcattaagggaattgagccagaactaactggaggagcctaaagccctggctgagaacagggcagtgaaagggaactgggtgacaactatggggacgaatgagagtgatatgcggccagttgatccgacagcaacagagtatccacttagtgcggagtcctgaattcaactggagaaaacagacacaaaatctagaaaaatctagactcgagggaattcttagtctggtaggggagctagggcacacacatgagaaaagaaaagttgacatgtgctaactctggtccgaaggctcacagagacctgaaatgatcgctactgtgtagggctgatgggagggattcctcttagaggcaagtcagaatggggttgaagatggttaaaaagcacttgtgggctgggcgtggtggctcacgcctgtaatcccagcactttgggaggctgaggcaggtggattactcaaagtcaggagttcgagaccagtctggccaacatggtgaaaccccatctctactaaaaatacaaaaattagctgggcgttgtggtgggcacctgtaatcccagctacttgggaggctgaggcaggagaattgcttgaacctggcaggcggaggttgcagtgagctgagatcgcgccattgcactccagcccgggtgacaagagtaaaactccatctaaaataaataaataaataaaagcacttgtgttgaatcagtgctttctagtgcataaatctatttctcatctctctttactgccaggatggctctcgtcaagcacagtcaaacctgacctttttgtcaatcctgaaggaaccttaccaggagttggctttcatgaagcccaaggacatctctagcaagctccctaagctgatcagtctcatccgcatcatctgggtcaactctccccactacaacactcgggagagactgacctcgctcttccgaaaggtgtgcatatgctgagggtgggatggaggggtttatgagggtggccgggttttctgaagcagggggaatgcattcggcagaggatctgtggttgaaaaggtagtgaagattgcccttctgctcagagactgagctcagaaggcttctaccggcatgatctgctttagggttgctcagcattggagcctgggctggactttctgtttctaggtggaggtggcttaggcaggaagaggggcttcagaagaggagttggtggaagacggggaagcagcaggaagaacagacccccaagctgagctgtgtggaaggaaaagctcttcttcccattcctcaagatggagattgcagtgggggagaggggatttaggaaggagcaccggctcttgaggagcagggcctggtgcattcactgggggtgaaaaagccaaagagtgggagaagggacactgagctgagaccttgctgggcagggtggctgcagagctgggctgaggcagagtaaggggccacctaggacaaggagtgggcatggaacccagaggtgtcggcctggccaggggtggagaaccaggggtgggatgagtttcaggagtcaaattaaggagtagggggctgagacatgaagcacgggcagggggatgcagagaaggagttgggtgtcaaggaggtggggacagaggctgtggggactccttctgcagatgagcaatgagatcatccgcttatgctgccacgccatctccctggaccggatctttgagggatatgtctcttccagcaaggaggacctgcaaggctgcattctctgttgtcacgcttggaaagatcactacgtacaggctgtgcagatgcacatccagtatgatacgcctcccctaacatcccatgtctcaactcccttgtcagccctgtaagagggtagattctgacttctttcctgtacactttgtttagcctcttggttgtattttccgagacccaggagtttctacatctggccaaattttctgtctggatacagatactgtatctcattgccctggcttctccttttttgttttttaattttaattttaatttttttttgagacagagtcttggtctgccacccaggctggagtgcagtggcgcgatctcagctcactgcaagctcagcctccgaggttcatgccattctcctgcctcagcctccccagtagctgggactacaggtgcccgccaccatgccaggctaattttttgtatttttagtagagacagggtttcaccgtgttagccagggtggtctcgatctcctgaccttgtgatctgctcgccttggcctctcaaagtgctgggattacaggcgtgagccaccacgccctgcctggcttcttattttaataatctctcctccctgatcccaggaaccctacctggtcttttcctcctatcttgaccccatcgtctaaaattctattatgtatgaatctgctcctagaacttagatgctctgtctcctgtctggttcttctcaccttgagtcttgtcctttgggattcaggagggttgtttctcggggtctgatttttctagggctttccctgaatgcagggctcctggtctaggtttgcatagccagactgctcttgccttccaattcagtcggcctttctcctgacacaggttctccagtcggggctgggtcctagatcagaccagcatctttgctcaggttgatgcctttgtgcagcgctgcaaggaccttattgaggtgggaagactgaagaaccaaaagctaacagcagaccctccagaatccctccccacctcccaccccaggaaccagggcaaacggggcagaggctaaatattgaacttatggccaggcgcggtggctcacgcctgtaatcccagcactttgggaggctgaggcgggcagatcacctgcgatcagcagttcgagaccagcctggccaacatggtgaaaccccgtctctactaaaaatacaaaaattagccgggcctggtggtgcatacctgtaatcctagctgcttgggaggctgaggcaggagaatctcttgaacccgggaagcggaggttgcagtgagccgagatcatgccactgcactccagcctgggcaacagagagagactctgtctcaaaaaaataaaagaaaagaaaattgcacttaccacattggcttttcctgcacaattgtgtgtcctactaccacaccgctttttctggcatttgcctcttatcgctgccctactatttcatatttcattctgtggccaaagttcatcccagcagccccctgcagctggttggccctccctggtttttagatattttcttcttctttttttttttttcacttgccatcactcacagtgatgtttttagacatttgaagctaaaccaaatagcttaggactttggagtttggaaggaaagcaggaaccctcatgctgtcttcttttttaggtatgtgactgtcagtatcacttcgcccgctgggaagatggcaagcagggtccccttccttgcttctttggtgcccaggggccacagataacacggaacttgctggagattgaggacatctttcataaaaatctgcacacgctgcgagccgttcgcgggggtatcctggatgtcaagaacacctgttggcatgaagactacaataagtgagggaaccacaggctgatgccaggcgtgggcagggaaggcagatcaggcagccaagagtgggaggagtggcgagagtatgcaaaggaaatggtggaaggacagatcgggatcagggcggtggcccggggggggggacaggagagagtgcaggggaggggggtggcagcttgggttgagggttccagagtgagcctttccggacttggatcttggttctgccacataccagatatatgacattgggcaaattactccaccagctgtctccacttcctcctctatgcaatacggttagagatagagcccatctcacagcattgttttgaggattaaatggattcatgtaggtaaagtacttggagtgcctggcacacaggaagccctctgtcctcagcaatgcatgggattcttcctcaggggttggagttgggggcaggcgagggcactcagctgccacatgcctctccaccggtgcaggttccgtgccggaatcaaggacctggaggtgatgacccagaacctgatcacctcagccttcgagttggtgcgggacgtgccgcacggcgtgcttctgctggacaccttccacaggcttgcctcccgcgaggtgcggctgccccgcggcttcctcggcttcccgtcccgcgtgctttcctggagtccctccttccggaggccctcctgcctccacgtgtgcccttctccatgtccagcattcgggcgcctcttgtctttcttctgttccctggcttcggcgtccccgggagtgtgactcccgcagcggggtgcagctttcctctgggatgagtgaccggagggaacccgccttcccgggcacgtcgccagcctcttcctcttcttccctaggctatcaagcggacttatgacaagaaggcggtggatctctacatgctgttcaatagcgagctggccctggtgaaccgtgaacggaacaagaaatggccagacctggagccctacgtggcccagtattccggaaaggcgcgctgggtgcacatcctccggcgtcgcatcgacagagtcatgaccgtaagtgcctggccttctccatattctgtcgtcagtgagaccgccaggagggatgggggatggctcctgagaggttccccaaagagtcttcaggaccagcacctatgtcggtgaggggagtggcaggtccagttcagtgaggtcagtcgtgggttaagatctgcagaggtggtgtgtgaggctggtagaacatgcgccattttaggaatttcttttcttccttcctttcttttttttctctctctctttctttctttctttctttctttctttctttctttctttctttctttctttctttcttccttccttccctccctccctccctccctccttccttccttccttccttccttccttccttcctttctttttgtttttttgagacggagtctcacactgtcgcccaggctggagtgcaatggctcgatctcagctcactgcaagctctgcctcccgggttcacaccattctcctgcctcagcctcccgagtagctgggactacaggtgcccgccaccgcacccagctaatttttttgtatttttagtagagatggggtttcaccgtgttagccaggatggtctgagtctcctgacctcatgatccacccacctgggcctcccaaagtgctgggattacaggcgtgagccaccgcgcccggcttctttttcttttttctttttttctgagatggagttttgctcttgttgcccaggctggagtgcagtggtgtgatctcggctcaccgcaaccttcgcctcccaggtccaagcgattctcctgccttagcctctcaggagctgggattacaggcatgcaccaccacgcccggctaattttgtatttttagtagagaagaggtttctccatgttggtcaggctggtctcgaactcccgacctcaggtgatccacccaccttggcctcccaaattgctgggattacaggcatgagccactgcgcccggcctcattttaggaatttcatatcaggctgcagaggaggaatagggccggtatctggggtgttgggtcagtagaagatacagcctcatgatccagagacctggacaggtgacacccttacagagcctggtctctctggaaagacagcacaaagaaacaacagaaaaacattgttttaaaactttctggggccaggtgcggtggctcacacctgtaatcccagcactttgggaggccaaggtgggtggatcatttgaagttaggagttcatgaccagtttggccaacatggtgagaccctgtctctactaaaaatacaaaaagttagccaggtgtggtggcgggcacctgtaatcccagctatttgggaggctaaggcaggacaattgcttgaaccctggaggcagaagttgcagtgagccgagatcgcgccactgtactccagcctgggtggtggagagagactctgtcacaaacaaacaaaacaaacaaatgaacacacacaccctttgggaataaaggttgaaagctgttgaggtagtgacctgccatcatgcagctggtgctggtagagagttaggcagcctgcagatagctggaggctggtttgggcctggtggactacgcccaggctaggaagggctgatactggttttcaaccttgtgcctcatatcctgctccttctgtgactgacctttttctcccagctttttttcctaaacaaattctctgtgcttctctttcctcattttgactccttttctcattgcgccttggtctcttcctatcaccttcctttttgactctaccttccttctaagttatcaaaactcaatccatctccatagcaagccttatgcatattgttggggtatgtgcgcatgcgcgcatgtgtaggtctcagggagatggtggcccctggaggaaggtggcaggccgactccacccacctgttcttcttcccctcagtgccttgctggtgctcatttcctgccccgtattgggactggaaaggagagtgtgcacacctatcagcagatggtccaggccattgatgagctggttcgaaaaaccttccaagagtggacatcaagtctggacaaggattgcattcggcggttggataccccattgctgcgaatcagccaggagaaggcgggcatgctggatgtcaactttgacaagtacaggagccacctggccccttttccctatactccccttctgcagctctcccaagaatttcactcccatcttttgactcctctcttcattattctctctctttctcatacaatatgtttgctatcgtcattttacttttttttttcttcttttatttttgtctctccccacctcccaccctgctatcaacattttaattttacaacttatcttaaaacacaacaaaacaaaacaatgatcggccaggcacggtggctcacacctgtaatcccagcactttgggaggctgaggtgggcgcatcgcttgagcccaggagtttgagaacagcctgggcaacatggcaaaacccagtctctgcaaaaaatacaaagattagctgggcgtggtggcacaagcctgtagtctcagctacttgggagggtgaggtgggaggatcgcctgagcccgggaggcagaggctgcagtgagctgagatcacaccactacactccagcctgggcgacagagtgaccctgcctcaaaaacaaaaatcaaaaaccactccactatctgactaaaccagtgatgtcgctgttctgccactagatggccataatggctcagctaagtcacccaaaccctgtccctttcctgactgttggtggggctgtcagaccatgccttcttctacagcttcattgttatgaaactgtcatactataattatttaaaatgtaattaatcaattaactaatttattaaaaatatatagtgagcaccttccatgtgtcaggaactgaaataggaacaggcagggaatgtacacaacggccaagtccctgccctcagggaggttaggctgctgctttctaagtcaacagctctactcttggagtggggcttcctgtccacataagatgctttgaggctgtggctactagtgttggattccactcataaaatgtccatgcttgagcctggccagcatggcgaaaccctgtctctactaaaaatacaaaaattagctgggcattgtggcaggtgcctataatcctagctacttgggaggctgaggcaggaaaatcgcttgaacccgggaggcggaggttgcagtgagccgagatcacgccattgcactccagcctgggcgacagagtgagtctccgtctcaaaaaaaaaaaaaaaaaaaaaaaaatgcttgtggggccaaatgtaggaggggctttgccagagaagtgctgtgtggagacggagtcccagggacagatgagactgtgagtgtttgtcctgggcagcaaaaggtggcccaaccaggggaagagggcacattctggctgagaaaggaagcaaaagaaccaggatggagaagcagagcggagtgtcaggtgagaggggtgaggcagaggcatcagtgaggaggacagggatgttgggagctgcagggatgaggaagccgttgaggagcagagtgtgcacatggctaggtcgagaggtttgagaaaaggcttcgagtagtgagagttgttggagattggctttgctgagcttcctggttttgtgagttatggccaagcacagccacgtaaacattgcctcataaatcaacgataagattctgaagactgagaaactaggccagagttagcctagttacgccatttgcaagcgcataatggggttgaacctgcaagacacattctcccatcgagctgggtacccccaaagttattgtgtcaggggagccgcacagatgcccttggtgtttatggatatgagggcacacagttcaccagctgtcctttttctgtgaaataagggattgtattcaaataacaggatttccttaaacactaatgatcaatctttacatttctttttttttttttcttgagacagagtctcactctgtcgcccaggttggagtgcagtggcgcaatcttggctcactgcaacctccgcctcctgagttcaagcaattctcctgcctcagcctcccgagtatctgggattacaggcgcccgccaccacgcccggctaatttttgtgtttttattagagatggtgttttgccatgttggccaagctggtcttaaaatcctgacctcaggtgatctggccacctcggcctcccaaagtgctgggattacaggcatgagccactgtgtctggccaagtatttacatttcaaatatgagagaaaacaaaagttgagacaagaggtaaagaaatgctgtgtgtgtgtaggaggtaggagaggatcaggaaaactaactaataggtactaggcttaatacctgggtgacaaaatcatctgtacaacactctcatgacacaattttacctatataacaaacctgcacatgtacccctgaacttgaaataaaagttaaatttaaaaaaaatgccatatgtggctggcgcagtggctcatgcctagaatcccaacactttggaaggccaaggcgggaggatcgcttgagcccaggagtccaagatcagtgggggcataaacaaaaattagccgggcatagtggtgcatgcctgtagtcccagctactcaggaggctgaggtggaaggattgcttgagcccaggatattgaggctgcaatgagctgtgatcgtgccactgcactctagcctgggcgacaaagccagaccctgtctcaaacaaaaaaaaaaaaaaaaagaaaagaaaaaagaaatgccatatgtgagcactggttggtggctacctccttctactcgccaggggtcagccagcgagagtagatacagcatcaacttcagtgctaaacagtctcaagttcaaaccctggagcattttgccacgtgacctcaggcgggccattgaatttctctgagcctgagtttcctcatctacttaaaaaaccctttcctggcattatcgggcagctgatgactcacgcaaaggtcctcacaaagaatgaacaaccaagaagcattcttgcccccttcaaaacaattgcctcataaaacttgatgaagatagtattttcaaaacaaatgtagcagagtgatgtaacagttttagtttttaaaacattttaacctttacaaagggctaatataggcatacagtgtaaaattcaaaagtcattctacaaaaggatagagaatgaaaagcctgctcctctgctgtcccctaggggacccagtttcactctgaagacagtcagtgtttcagattcttgtataatattccaggaatagacatatatgtctacttaagtatccttttttgcataaatagtagtgtactatacatattgttctatatattccaagtgctttcaaaatgattaatttttccattataaaattattgatcattttagaacatttgcaaaatgcagaaaagtagaatgaagaaaaaaatactcctaagaataaccacttttaatgatttggtatatttttatcacttcctccccaccctccatttcatttggttgttttcctttaatcttttaaatctttactgggtattttaaaatgacaaaaacactacatgctcactgttaagaaaaacaaaagattaatgcagaagtatgtaaagaaatggctggcatggtggctcatgcctgtaatcctagcactttgggaggccaaggtgggcagatcacctgaggtcaggagttcaagaccagcctggccaacatggtgaaaccccgtctctactaaaaatacaaaaattagccaggcatggtggcgtgcgcctgtaatcccagctacttgggaggctgaggcaggagaatcacttgaactcgggaggcggaggttgcagtgagccgagaatgcgccattgcactccagcctgggcaacaagagtgaaactttatctcaaaattaaaaaaaaaaaaaaaaagaagcttgtaagggaaaaagtgaaaattcagcacatatccccaatccctagaggtaaccatgattatcatgtaatcaaaaatatatcctgcatatatgaaatagaatcacatcatgaatggcatttttgcaacttgcctttttttttgaatgtggagacagggtcttgctatgttgcccagactggtctggaacttctggcctcaagtgatcctcccaccttggcctcccaaagtgctgggagccactgcaccccgtcacaccttgctttttttttaaggttaacaatctgtgtgggggatctttcattctgtatgtatagaattacttaattctttttcctggcttgcagtatgaaatcatagtatggctgtactgtaatttaatgaaccagtctactattgatggacttataaattgtacagtttctgtaaggttcttgactattccgtgctggtggatttcaactgtgattcccgcactttgttcccttccctctgcagcactgtgtttactgaaatttgaacacagtgtccctctagttaggataaaccaggagacaacttctctgtctgctattatcatctcttgtctggaataccttctgcataatcttgatagtagagcttatcaaggcaactttgggccaaatatttatggcttgggtttatctgaaatccaaataatggcgaaacacgtcttccagatagaagaggtgcctgtttctgtcctttggggattgttttccagagagatgttataggatactttacatttttgtggttttaagataaaactgcctcaatccagtaaataatggaagggaaagaacacgatcacagtgaaggattttgaaagtctgggctcatcaccagtaaagaaatccaagtcagttacagcttccaaaacttattaacacttcaaggaagtgaagataactttatcagatttgctctttgtgttcaagctccagttaagatcttgaaataagcagactgtccaaatgttctgatgttcctcggaattacctggctctcttagtcctggagccttccagtccctaatagcactgatttaatcccacaaggggttttggtatcccacctatatcccaaatatttgaactctgaagtccaaattggcttttatcacgttttacggacagaacagcttcacagattgcacttaacacaaacatattccagatgtcatccacaccctggctgaaggagctgtattatcaccctgtgtggagcagagtagaatttcctgagaggaggagacgagatactgaggtctgttttttgttcccagagcttctctctcttttttccccggtcacagagtgccttttccccccgggtcagcccgctctgggctctaaccactcaattcctctggctttcctttctacctctactgcctgaccacttgtttggagataaattatgaagtatttttaaaaagtcatcccccagacagatttttatttatttatttttttgagacaaggtctcactgtgttacccaggctggagtgcactggtgcaatcttggctcactgtagcctccgcctcccgggctcaagcaaccctcccacctcagcttcctgagtactgggaacacaggtgcctgccaccatgcccagctaattttttctatttttggtagagatgggttttcaccatgttgcccaggctggtctcgaactcctgagttcaagccatccacccacctcagcctcccaaagcgttgggattacaggcctaagctaccttgcccagcctcgccacacagatttttttttttttttaaagaaaaactgatatttgtcaatgaaataaaatttgcattctggaaatttcttgacaaacttcagttaaagactgaacatcattcaaagtttctcccaggattttcagctcagcatcaggaaggtattgtctgaattcatcctgttgactgacatattaaacttggataatttgccttaaagttatcttgaaaatcttgccttggccggatgcggtggctcgcatctgtaatcccagcactttgggaggccgaggtgggtggatcacctgaggtcaggagttcgagaccagcctgaccaacatggagataccctgtctctactaaaaatacaaaattagccgggcatggtggcaagcgtctgtaatcccagctactcaggaggccgaggcaagagaattgcttgaacctgggaggcagaggttgtggtgagccgagattgcgccattgcactccagcctgggcaacaagagctaaactcccccccaaaaaaaaaaaaaaaaaaaaaaaaaaaaaaaaaaaaaaaagaaagaaaaaagaaaatcttgccaagatgagagaatgaagaatttgttttggtgcaatgttggccagcatacatgcccaagtaggcttgctcagatgtttatcaacagtgacaaatccaagacatccagtttgaaggacatgataatacgtttatgctactagaaatgtttctgtatctattcacacacttccaatctccccatatcattataacacaactttttgttacattgatgtttagggcttatcttattatgactctattaggattgttcactgctgagttgagtaattttacattgttatagttcttttgcttgtacaatgttttgctcaatttggaatttaaaattgcctcattattaggccaggtgtggtggctcatgcctctaatcccagcacttcaggaggctgaggtgggtggatcacgaggtcaggagttcgagaccagcctggccaacatggtgaaaccccgtctatactaaaaatacaaaaaatagctgggcatggtggcgggtggctgtaatcctagctactcaggaggctgaggcaggagaatctcgcttgaacccgggaggcagaggttgcagtgagctgagatcacgccattgcactgcagcctgggcgacagagcgagactctgtctcaaaaaaagaaaaattacctcattattatcgttattactattattattatttgagatggaatttcgctctgttgcccaggatctctgctctgcttcccaggttcaagcgattctcctacctcaggtgatccacacacctcagcctcccaaagtgctgggattacaggtgtgagccattgtgcctggccacctcattatttttgctagcgcagcattcactatcactaagtcctccaaaccaaccaataaaatccctttgagtagtatttttcctcacaatctgacatactgggtattggtttcaatgtttttcttagatctgtttttttcctgtcctcctgcttctgtccagctggtgttgttttcaaggcctgttacaaagcagttaccccgggacttccctcagcctctttccttgtttgatttcatgtttcctttgtcttcctcttttttggtttacgcctttgttttgttggtgtgtatccattagtagcttcctaagaaatggtgcaggggaggtaaatcttttgagtttttgcatgattgacaactgttttcctgccctctgcttgttgtacatttggctgggtttggaattctagccgatttatagtaattgtctttggctttggcctctctcttttactttggaggctttccttaaatgcctggtgattcattgctcatttatactttcaagaggcttactcactttgaagatattttagcagttttaaaaataccacatacgttagtggagatcttcagggtttgaaaaaacagcatttcttcttccacaatctcttaaagcctgtatcacaaataagtgagcacttgaaaatcatttcattcttggaggattcttctccaataaagacggtaaaaacacaatcctttgcaaagtttgaaatgtgttattatctccaatattgttaattcagtgtagaaaagactaaaaaaattctagaattttcacctcaatattctttccaaataacatttcagcagtatttagaatgcaaagtttcttgagcatatcttcaggtcgtgggaatgtttatcctttgtgattaaaaagtgcaattttattttaaaagccctgcagattaaaaaaaatcaagttatttatttatttatttatttatttatttattcattttttttttgagggggagtcttgccctgttgtccagtctggagtacagtggcaccatcttggctgactgcaacctctgcgtcctgggttcaagcgatttctggctaatttttggatttttagtagggatggggtttcaccatgttggccaggctggtctcaaactcctgacctgaaatgatccacccaccttggccttctaaaatgctgaacttacaggcatgagccaccacaccaggccaagatttttttttaattttattttaaaaaatattccatattttcttctggtattttatgattttattctctacatttagatgtttgatccatttgaaatttattttggtgtagagaaagaggtgcagattcaaattgagttttgtatttcattgtttgtttgttttttcctgatggctagagccatctcatttagagttgacccaatctcatttagtgaactactatctttatagtaacacattcccgagtatattcgtgtctattttgggattctctattctggtatctgtctattcatgtgcaggaaccaaactgttttaattattgtcctcattactcttctttcttcagagttttccaggctatatttaatatttatttcccataagaattttagaatcaatttgtttagttccaaaaatagtctcattcctatttttataggaatagagatttggttaaatttataggttaactttagaagaatatctttatgattttgagtctttccaagaatagttgtggggtgtgtgtgtgtgtgtgtgtgtgtgtgcgtgttttgagactgagtcttgttctgtcatgcaggctggagtgcagtgacacgatctcagctcactgcagctaggacctcccaggcttattgatcctcttccgcctcagccccccaagtagctgaaactacaggtgtgaaccaccgggcctggccaacagtgttttttctttcaatttatttaagtcctgccttttccccttaagtcattttacacacacacacacacacacacacacacacacacaatttctgattaatttttggtattttatttttgttgttttaattgttattgtctctttttcttgatgataatatctacctagtcacaatttttgtattgagaactttgatttttataaattaattttgtacctagcaacttttacaaatatgtttaaaatcattttttcctttaaaaacatttttattatgaaacttgtcatagacagagatatacgtaaaacttgtatgttcaggccgcgcgcggtggctcacgcctgtaatcccagcactttgggaggccgaggcgggcggatcacgaggtcaggagatcgagaccatcctggctaacatggtgaaaccctgtctctactaaaaatacaaaaaattagcggggcgtggtggcgggcgcctgtagtcccagctactcaggaggctgaggcaggagaatggcgtgaacctgggaggcagagcttgcagtgagctgagattgcgccactgcactccagcctgggtgacagagcaagactccgtctcaaaaaagaaaaaaaattgtatgttcagtttaactaacaaatcattataaaataacaaaataaaacacccttgcaaactactgcccaagtcaaggattgccaggagtcctagagcctctcccacatgcccactgaataattatttttcaggtgaattgttgttagcacttaaaattcaggagattttacatgaaaaaccaatttctggcctctcttgaaaaatcagaaaatgcatccacactgggcccacatttccagatggcaacaattgcctggagcgtggagcatggctttcttcgcgggagcatgtcctcttcagctcaactttaaggccaagcgtcagttgccatttatcatcacacttgagccacacttgccttggaggtaggtgtctgaatttctgaactttgctttagcatattaaaaacagaaggaggttggatgtcggaaagtaaggccgaggaaggatgcatggttctggtgtaggcggtgggatagtacccttccctgaggcaggagcgccaagtttgcagagaagatgatgtgcttgtttctagacacattgagtttgaggtgcttgtgcacgagcaagcagggcagagctatctagtagacagttgcacaacgaagcccagagctcaggttagctgtgcaggtttggggatcatcagctttcggaaggcagccgaagccatgggagtggaagagatgaccaagggggagtgggctggatgtgaagaacctcggggagtccgcattgaagggagctgcaaggaaagcagattctttactgtatccccagcgcctagctgaatgatatttacatgggacactggagagaggaggatactcctactgaaaggaagggcagaaaagaggaccgtggtccagaagctagggaaaagagtgcgtttgaagaaagtggggtgtagtctaccatgttaaaacctacaggcttgctgggtgctgtggctcacgcctgtaaccccagccctttgggaggccaaggtgggcggatcacctgaggtcaggagttcgagaccagcctggccaacatgacgaaaccctgtctctactaaaaatacaaaaataagctgggcatggtggtgcgcacctatagtcccagctactcggaaggctgaggcaggagaatcacttaaaccggggaggcagaggttgcagtgagccgagatcgcaccactgcactccagcctgggcgacggagcaagactccatctcaaaaacaaacaagcagaaaaacctaccggcagatcaaggaggataaggcctgggaagcatccatggggtggagtgctaggggatgcttggtgagtgtgatgagggcatttgatgggtggagtgggagccaggtctcagggatgaggagggaatgggaagaaaagagtgacggggatctgtggacgacattctttaaagcaggcaggccgtgaaggggaggacaggatatggcacctgaagaaggacaggagttgaaggggcgctgttttttatccttttaatattgtagaaacttggccaaacttaaatgatgggaaggaactagtagattgaaggtataggagagctggaagagggcatctgaaagggaaaggaagttatactagaataggcagcccaggcttccggttctaggtgcttcaggagccgtggcttaaggtgcagacatggccaagtccacaccatacaccaccagtcccgaaaatggcacagaaatggtatcaagaaaccgcgatcacaaagatacaaatctcttaagggggtggactccaagttcctgaggaacatgcgctttgccaagaagcacaaaagaagggcctaaagaagatgcacaccaacaatgccaaggccatgagtccacgtgccgaggctctcaaggccctcgtaaagcccaaggaggttaagcccaagatcccaaagggtgtcagccataaacttgatcgacttgcctacattgcccaccccaaccttgggaagcttgctcgtgcccgcatggccaaggggctcaggctgtgccggcccaaggccaaggccaaggatcaaaccaaggcccaggctgcagctccagcttcagtttcagctcaggctcccaaagctgcccagtgccctacaaagacttcagagtagatatctctgtctgccaacgtgaggacagaaggacaggtgccacccaccccgggctgccgtctgcatggggctggggtcctcctgcgctattggtacaaataagcctgaggcagaaaaaaaaaaaaaaagaataggcagcccaggaagaagggttagccttgggtgggaggagggactgtcctatcataaatgggagaaattgtagcgtggaaacaggtaagtgcatacgttttacagctggaagtggatggaattctcacctgatggccttttatttctgtgatataggaggtgaggctttctgcagagagggcaacagggcaacaggaagaccaggtttgagaagagtggaaaggatttgcaggtagtgacttgtgagaacaggagggagggcaggttagggaacagggatgcagcctggagaacccaggtgggacaggctgagtcacggtggtgccaagctgtgtggtcatgtgaccttctccagcctttcccacaatgaccttctccagcctttcccacaggggctcgaggggaggacagtcggatttagccagcactggcgttttgtcaggaggtttagactaaagaatgagacaaagtgagtgaggattggcgagagagtggctaaaataaaggataccaaggtctgtggaggaggaagtgaagtagggagggggttaacaggaagaaaaaccaggggtcagtggtctgaaaaataagcaggttgggagaacttgaggaccaatgctgggatgcaggggaggaagctgggccccgggagcaggaggtctgagtgggttttctcagacgtggagcggttgtgaacagcaagcttcagggcgtggcatgggagtggcagctggaacaggaaggaggaggccactggatatgaggtggcaaaggacacttaagatgaaggcttcatatgcaatttaaaattgcctggtatctctttttttttttttgagacagtgtctctgttgcctaggctggagtgcaatggcacaatcttggctaactgcaacctccacctcccaggttcaagcgattctcctgcctcagcctcctgactgatatctcatttaataaagaaaaaaaggccaggagtggtggctcatgcctgtaatcccagcactttgggtgctgggtgaggtgggtggatcacctgaggtcaggagtttgagaccagcctggccaacgtggcaaaaccccacctctactaaagatacaaaaattagctgggtgtggtggtgggcacctataatcccagctactcgggaggctgaggtgggataattgcttgaacccaggacgtagaggtggcagtgagctgagattgcgccactgcactccagcctgggtgacagagtgggactccatctaaaaaaaatttgaaaaaaagaaacaagtgaattaactaattaatttatttattttgagacagaatctagctctgtcacccaggctggagggcagtggtgcgatcttggctcactgcaacctccacctcccgggctcaagcaatcctcccagcttagcctccagagtagctgggactataggctcacactaccatgcctggctaatttttgattttttgtagagatgggggtctcactatgttgcccaggctggtctcaaactcctgagctcaagcgatcacctacctcagcctcccaaagtgctaggattaggtgtgagccactgtgcctggccccagtgaaattcattttaatacttgatccaacattccccaaatatcattccaacatcaatcaatataaaaattattaatgggatattttctattatttctatctatttataatgattattgttttagagacagggtcttgctctgtggagtgcagtggtgcgatctcagctcactgcaacttctgcctcccaggcttaagcgattcttgtgcctcattctcctgagtagctgggattacaggcgcacgccactgcgcccggctaatttttgtattttttgtagagatgggattcccccgtgttggccagactggtctcaaactcctgagctcaagtgatccgcctgcctcggccccacaaagtgctgggattacaggcgtgagccaccataccaggcctctgcttcatttctcatctcgacatttccctgtgcttcccagcctctccacctgttcgattgttgctctagtttatcccctcgtgcggtcccctcactgcctggctgctctctctcaaaggtcccttctgattctctttgcggaaattgactactgggagcggctgctgtttgagacgccccattacgtggtgaacgtagctgagcgagccgaggacctgcgcattctgcgtgaaaatctgctactcgttgctagagactacaataggtagggcttcagtcctcactgcagcccttcaagatgctattttattccttctttttctcttatctgccctgtaatgttgttcattttctacaatttctgtcctctacatcttttccatctcaaaaaaaaaaaattgtctcccactcttacggccctatcattattcctaccccttgtagttttattttctagctgcagggtggagagtaaagccaaccaggtcccctcccaccccactggtcacttgtaccatatatattgtagctctgggccagttctctaggaatgagacgggctggcattaggattatgtgcacagaataacatcagactcattgaactaaggccctgctgcccccatccctgcctcagtttctggactgccttggtattctctctggagtgaggctttgttctgggttaggtactgtcttagtctgtttgggcttctataacaaaatgccatagaccgggtggcttataaacaacaaacatttatttctcacagttctgggggctggtgagtccaagagcaaggcaccagcagatttggtgtctggtgagggcctgcgtcctggttcataggtggctatcttcttgctctgtcctcacatagtggaaggagacaagggagctctcttaggcctcttttatgaagccactaattccattcatgagggctccaccttcatgacctaatcacctcccagaggtcctaacaccatcactgtgggagtggggattttaacatataaatttggtggggacacacacattcagacgatagcaggaaatttctcagcccagttaaagtccaaggaggtgcaaccagcagtcttgtttgggtgtctagaactgcagtgtccaacatggtggcctccagctgcatgtggctatttccatgtaaattaagtaaataaacttaaaaatttgattactcattggtacaggccacatttcaaatgctccatagccaaatgtgatgagtgggtgctatattggacagcacacatcgcattaagttggtgcaaagtgattgcagttgttgccattacttaaatggcaatcacttttgcaccaacctaagagaacacttccatcattgcaaaaagttcttttggaagtactagtctagaatctagtctagaatctagactagtggtctagaaatgttcacatttctccactgtttcctgaagtggaggaaagatcttcagggcttgtcccctctggataccaggcctctcttatgcacaggattattgccatgctgtccccagatgagcaggccctattcaaagagcgtattcggctcctggataagaagatccacccgggactcaagaaactgcactgggccttgaagggggccagtgccttcttcatcacggagtgccgtatacatgccagcaaggtgggccatggtccttagaccctaaaggtctgcaaggctgatgggtcatttatacctgagtgttgcatagagattgggaaacctgggggtagtgtaaaaagaattaagtttgcttggggaaggacttttttgtgtgtcatccagtctagctggagaacaagtgggagggtagaatgaggtccagatggtctcttcccgagctgaaactcccccatgacggggcctgactctaggtgcagatgattgtgaatgagttcaaggcatccactctgaccattggctggcgagcccaagagatgtcagagaagctgctggtacgcattagtggcaaacgggtatacagggacctggaatttgaagaggaccaaagagagcatcgggcagctgtacagcagaaattgatgaacctgcaccaggatgtggtgaccatcatgaccaactcctatgaggtcttcaagaatgatggtcctgaggtagggttcctgtggccaggatgttgtggttggaaaaaccacagtcccccagttccatcaggccattctcttgctccccgacccttttttcttttttaccagtgtgtacttctcaaacatcgtgctctagtcttggactcagccaaccttcagtcctcacacctcttcctccaggactcagcgtcctgcgtttccattaaaccaacttgtttccttccctgttggctggttctcacttcccaggatgtgccctgtcttccctgaaaagttctctttttcctccctccatcccatcagattcagcagcagtggatgctgtacatgattcggctggaccgcatgatggaggatgccctgcgcctgaatgtgaagtggtcactgctagaactatccaaggctatcaacggggatggaaagaccagcccaaacccactcttccaagtccttgtcattttgaagaatgatctgcaaggaagtgtggcacaggtaagaaccactttgcccccaacatctcaaaaccattgcatcttatttgtcagtttcccttaattcctaaacttggtccttggccttgactttatcctatggccttcagacctgctgctgaagtgtgtgaccttcccagtcctaaggcttttctctccatctccactgggttcctcacaggtggaattctcacccactctgcagactttggcaggtgtggtcaatgacattggcaaccacctcttttccaccatctctgtcttctgccacctccctgacattctcaccaagcgcaagttacatcgtgaacccatccaaacagttgtgggtgagtgggcaacggggagggcacaaggcacagggtttcagaggctgtcgagtgggccaggccaggaggagagaccagggctatttccaggcatactgggccagtcacctccctgacctggggaaaactcaggtcaaggggccagatcggctggcacagtggcttgtgcctgtaatcccagcactttgggaggctgaggcaggcaggtcatttgaggtcaggagttcgagactagcctggccaacatggcaaaaccccatctctactaaaaatccaaaaattagccaggcatggtggcgggtgcctataatcccaactactcaggaggctgaggcaaagaatcaccccggaggcggaggttgcagtgagcggagatcatgccactgcattccagcctgggtgacagagtgagactccatctaaaaaaaaaaacaaaaacaggggggccagactggggaagggagcaggggcttggatgggggttgagattaggtgactgatgctcatgggttttgggatttgggatgggagatgaggaaagacaagcttgggactgggactgggactggcctgtaagaggcctagataccaacagacaagacatcacatcctatgaaggagacactaagagtcacattttcactttctgcctactcctttaccttctaatgtgcatgtttgagctgtatttctctgggaagctggttttagagtggaaggtctggagcagtgggcagggctcaggcagaagttgggttggggtggaagtcagtgagaagcatctttcttggtcctttgaagagcaagatgaggacatcaagaagatccagacccaaatcagcagcggcatgactaacaacgcaagcctgctgcagaactacctcaagacctgggacatgtaccgggagatctgggagatcaacaaggactccttcattcatcgctaccagcgcctcaaccctcctgtctcttcttttgttgccgacattgcccggtgagtggtgagggtggattgaaagtctgtctgtaggaggcacagcactgcaggaggagcccaggcctagagtcttgggaagtgggtaggggagctgaggatgacatgtgtcctcaatgacaggaaaagaacaggacctaggacattggacctttgcttctcaaggggtagagatcagggaagagctggacaggatttaggtgaaaagcagttgtctaggggaggatggcagggcctggtgagaaagaagaagttccagagatctggaagatgaaagaagtgagccctttgattctaagaaggcagatgggagttaaatagaagattattttgtttgttttattttgtttgagacaggatcttgctctgtcattgcctaggctggagtgcagtggtgtggtcatagctcactgcggcctggacctcctgggctcaagcgatcctcctggctaacgctcctgagtagctgggaccacaggcacatgccaccatgcttgaataattttcttttttttaaaattttttgtagagattctatgttgcccactcaggaagaaaatctttttttttttttcaaatatttttttttgagacagagtctcactctgtcatccacgctggagtgcagtgcaacctctgcctcccgggttcaagcaattctcctgcctcagcctcccgagtagctgggattacaggcattcaccaccacgcctggctaatttttgtatttttagtagagacagggtttcaccatgttggccaggctggtctcaaactcctgacctcaagtcatccacccaccttagcctccctcagtgctgggattataggcgtaagccattatgcctggcctagaagaagatcttaatttctgatcttaactcacatctttttatgggcctctggtcattcattcattcattctgtaaacattcattccataaacattcattgtatgggccatgaggagttaagaaaaaaaaaaaaaagaaatgagcaagttctttcctcctgagggctctagagtagtaaggaagataaaagtatcgctgaaagagtggtggccgtggtgtcacgagaagacttggaatcgcagctgtgccacttagtagctgtgtgactttaggcaggttttctgtattctctgggcctcagttttctatgaaacagatattacactacctaccttggaaccttgtgaaatgattaaagatacatgaaggcactttgtaggctgaagccctgtgctcgtgtactgtgttattacacagctgcactgtggtaaatactgtgatgaagggatatcacacgccagggcagttcaatggaaggacagaggatttccagctggggattttagggaaggcttcctggaggaagggactttgcgtaggatttcttttttttttttttttttttttgagacggagtctcactctgtcgcccatgctggagtgcaatggcgccatctctgctcaccgcaagctccgcctcccggattcatgccattctcctgcctcagcctcccgagtagctgggactacgggtgcccgccaccacgcccagctaatttttgtatttttagtagagatggggtttcatcgtgttagccaggatggtctcaatctcctgacctcatgatccacctgccttggcctcccaaagtgctgggattacgggcctgagccaccaagcccggccgactttgcataggatttcaacaggcagagatgggcagtggggaaggcattccatgtggaggaaatagcatgagcaaaggcataaagatgtgagtccatgagcacgttcaccccacagagtgagatctgcaacataggcacaggaaaggaagaacacaaaggggcgctgtagcagccaagtgaattctcccaaccaccttgtgaggcaggctctgttactgtcactgtattacagatgaggaaaccgagactcaaacagttaaaaaaaaaaaaaaaacctgcctgaggtcatagaactaggaagcagcacagggcaaattcaacccagatctgtgccactctaaagctttttttttttattgagacagagtctcaccctgtcacccaggctggagtgcagtggcgccatcttggctcactgcagcctccgcctcccgggttcaagtgattcttctgcctcagcctccccagtagctgggattacaggtgcccgccaccacacccagctaatttttgtatatttatttatttatttattctttttgagacagagtcttgctctgtcgcccaggctggagtgcagtggcgcgatctcggcttactgcaagctccgcctcccagtttcaagccattctcctgcctcagcctcccaagtagctgggactacaggcgcctgccaccgcacttggctaattttttgtatttttagtagagatggggtttcaccgtggtctcgatctcctgacctcgtgatctgccggcctcggcctcccaaagtgctaggattacaggcgtgagccactgtgcctggccaatttttgtatttttagtagagataaggtttcaccatgttggctaggctggtcttgaactcctgacctcgtgattcacctgcctcggcctcccaaagtgctgggattacaggcgtgagccatcgcaccctgcctcactctagagctttgaatgccagaataagaagtttgactgctatcttatagccagtgactgggaaaatgacagtcagtcacagctgcatggctggggcagattggaatgagggatgcctgggagtagaagaacactctagaactgctgcccaggtttgggtggaaggaaatgagacctgcagcccgtgtggggacagagggtatgtctgcaaagaaaacaacatcctagctgggatctggggctcttgcagctacacggaagttgctaataacgtgcagaaggaggagacagtcaccaacatccagtttgtgctgctggactgttcgcacctcaagttctccctggtgcagcactgcaatgaatggcagaacaagttcgcgactctgctcagggagatggctgctgggcgcctcctggagctgcacacctacctgaaggagaacgcagagaagtgcgggctggggcgccccacaggaagggggcaggggcaggcactgggccttccactcactagcactccctttgcccgccttcagaatcagccgccctccgcagacactggaggaactgggggtcagcttgcagctcgtggatgccctgaagcacgacttggccaacgtggagactcagatccctcccatacacgagcaatttgccattcttgaaaagtacgaggtgccagtcgaggacagtgtgagttcctttggtgtttggtttacctgggacccgtatcagcagcagattgcgggggaggcccttggctgtcctcggggagagtagagaagtgacagcaggaggagactctagatttgaaagccaaagctagctcaaatgatacctttacttagcttctggatttcttttcttttcctcttcttcttcctcttttttttttttttaaacagagtctggctctgtcacccaggctggagtgcagtggcacgatcttggcctactgcaacctctgcctcccaggctcaagtgattctcctacttcagcctcccaagtagctgggaacacaggcacacgccaccacgccttgctgatttttgtattttttgtagggatgggggtctcattttgttgcccaggctggtcttaaactcctgaactcaagcaatctgctgacctcggcctcccaaagtgctgggattacaggtgtgagccaccgcacccagctggatttacttactgtatttacttttttttttttttttttttttggttttggcctcattctcagatatacagcttttggattttttttttttttttttttgagacagggcctccatccattacccaggctggagtgcagtggtgcaatcatggctcactgcagcctcaacttcctgggctcaagcgatcctcccacctcagcctcctgagtagctgggactacaggcacctcaagtgatcctcccaccttggcctcccaaagtgctgggatcacaggcgtgagccaccacacccggccagggtttcttttaggcctggcaaactcacaccttgatttttttagcccttgtcacatgtgcaaaactcgtccccagactctggtctggaggatcagaaaagagtccttaaaaactttcatgagagggcagacctcctgctcctggtcatcctccacgcatgagagggcagacctcctgctcctggtcatcctccactcatgagagggcagacctcctgctcctggtcatcctccactcatgagagggcagacctcctgctcctggtcatcctccacgcatgagagggcagacctcctgctcctggtcatcctccactctctgactcccccaggtcctggagatgctggacagtctcaacggggagtgggttgtcttccaacaaactctgctggacagtaagcaaatgctgaagaaacacaaggagaaattcaagacaggcctgatccactcggcagatgacttcaagaagaaagcacatacacttctggaagatttcgaattcaaaggtactccttgatccacctctcccgcttctttagcctttgtttagagaccccgccttccaagcccaggtcctgggaaggcgagaactgggaggggaggaggagggtcggtgctggggtgggggaagagcctccactcaggagcaaaggaggaggacactcagtggctctcgttttgggtagacagcggcgcagctcacagcatttctacttttcttttttctttttttttttgagatggaatctcgctctgtcaccaggctggagtgcagtggctcgatctcagctcactgcaacctccgcctcccaggttcaaacgattctcctgcctcagcctccccgagtagctgggactacaggcacatgccaccacacccggctaatttttgtatttttagtacagacagggttttaccatgttggcgaggatggtcttgatctcttgaccttgtgatctgcctgcctcggcctcccaaagtactggaattacaggtgtgagccaccgcgcccggcccgcatttctacttttcttatcccgacttccatattccatctgttcctgactctcaagccacatttaggagtttttgctaagattaaccgttattctttcaacgcgttccctcttactctccttcccttccctctctcacgtgaggagagaggtgagatttgcccacaaagagataggagagccatggctgtccttgccagacgtgagcgggaagctgagcttcatcctgaatcctccacaggccatttcaccagcaacgtgggatacatgtctgccttagaccagattacacaagtgcgggccatgctgatggccatgcgggaagaggaaaatagtctccgagccaacctgggcatcttcaagatcgagcagccaccctccaaggaccttcagaacctggagaaggtggtgtgctgagcaaggaccctgtggtcactgtcgataaggggcagggacaggagaatgggtccttagcgcccacaaaggcagtgggaagggagaggagctcacaaggagcttttgtttgtttcagttgaggtaaaattcatacaacaaaattaatcctttttttttttttttttttttttttgagatagagtcttgctctctcacccaggctggagtgcagtggcacaatctcggctcactataacctctgcctcccgggttcaagcgattctcatgcctcacactcccgagtagctgggattacaagcatccaccactatgcatggctaatttttatatttttagtatagagatggggtttcaccatattgtccagactggtctcgaactcctgacctcaggtgatccacctggctcgacctcccaaagtgctaggattacaggtgtgagccaccacgccctgccaaaattaaccattttgaagtaaacaattcgtgacgtttagtaattcataccacatctatctaattcccaaacatttttattaccctaaaggaaactctgcccattagcagtcacgtgcatcccccgtcccccgccccagtcccccgtcccccgccccagtctgttatgagcctgttttccatgtgtatgattcccctattctggacacttcatacaaatggaaccatttgtatgataatacgtggcctttttaatctggcttctttcgcttagcataatgtcttcaaggttcatccatggtgtggcatggatcagtacttttttaaatggctgaatattcatatttgaatatcgcatgagtttaccacattttgtttaccattcaccagttgatggacatttgggttgtttccaccttttagctaaagggagtagtgctgccatgaacacgcgtgtacttgtatttgtctgaacacctgttccctattcttgtgagtgtaagcctaggggtggaattgctagatcatatggaaactctatgtttaactttttgaggagctgccaagccattttccacagcagctgcaccgtttcacattcccactagcagtgtacaagtctccctatttctccatatctccgtgccaacacttatttacctttttttttttttttttggttctagccatcctagcgggtgtgaagtggcatcccactgaggttttgatttgcatttccctaatgactcatgacattgaggattttttcatgtgcttgttccttgataagctcttaaggcaacagagtggagaaaaatatgtggactgaggaggccgctgtattatctagaggggaagcttcacagagcgagagcagcgaagggcctgggcgtccgtcagggaggaagagggcaggtgccacttcatgcaacgcgcctttctgccctgtaggagctcgatgccctccagcaaatctgggagatcgcacgagactgggaggagaactggaatgagtggaagactggccggttcctgatcctgcagacggaaaccatggagaccacggcccacgggctgtttcgtcgcctcacaaaattagccaaagagtataaggtggggagaaacggcggggaggcggaagagaagctggtggaggatctgggtctgttcccagggaggtcgtcgggtcttctcatgcccccaacttttgctcaggaccgaaactgggaaattattgaaaccactcgctcaaaaatagagcagttcaagaggaccatgcctctcatctcagacctgcggaaccctgcccttagagagaggtgaggcttctcctctgctccggggtgtccactctgccccgctggcctgcgccaccacttggtccctcccattctcctctccgcagtgttcacagccctctcttcccctctgtccacaaatgtatgtctttttctctttcctctttttaacatttaattttgatggacgcatgaaaattgcatacactttggtgtacagcataatgttttgaaatatgtacacattgtagaatggctaaattgagctaattatcatatgcattacctcacatacctattttttgtagtgagagtactgaaaagctactctcagtgattttcaagtatacaatagattgttattaaccattgttgccgtgatgtacaggagatcatccctcttgtctaactgaaattttgtgtcctttgaccaacacctcccgaactttccacctaccacccccagcccctggtaaccagcactcgactctgcttctgtgagttcaacctgttcagactttacatatgacatatgagtgcgatcatgcggtgtttgtctttcttcgcctggcttatttcgcttagcataatgtcctccaggttcttccatgttgttgcaaatgacaggattttcttctttcctgaggctgaagagtatttctttgtatatatacaccacattttcatcctccattcatcgcttgatggacacttagggtgattccacatcttagctattgcaaatagtgctcagcgaacatgtggcgcagacaccaagcctgccactgtcctctgcttcttgcactgtctcgggtcatccagccttgctggcttcttgttctctgacccctgccctggggcctccctctctctgaaagggagttgtctatcatgactaagtcttatgtctttttttttcctttttttgtgggggagacaaagtctcactctgttgccctggctggggtgcagtgctgtgatctcggctcactgtaaccttcacctcgcgggttcaagcaattcttgtgcctcagcctcccaagtagctgggattacaggcacctgccaccatgctctgctaatttttgtatttttagtagagatggggttttgccatgttgcccaagatggtcttgaactcctggcctcaagtgatccgctcgccttggcctcccaaagtgctgggattacaggcatgagccaccgtgcccgtcccgccttatgtcttttgttatacaaaagattttattttgaggtagccagaagtataactttctttctgtatggtttttgcctttgtgccttgtttaggaagacctttcctatcccaaagttacaaatacatcctcttcattctttcctctaatgctttgtgtttctcaggtttaactcttttaattcatctggaatttattatatggcagaggatgtatctcaaaccattggggatagatttataaaaataaagtaatttttataaatggtgtttcaatcatgatctatccatttaagagaaaataattttacttctttgtctttcttccagtataacgtttttggcaatgccaaaccattaagtgttatacggttatgtataacctaaccactttatttgcttacattatttaacctctctaagcctcagttttctcatctgtaaatggaataataataattcctaatttatagagtagccgtgagaatgatatgagatgtttcatgtaaggcctttactcagtacagttctagagtaaacctgcggtgattcattgtgtgttttgtgggcacacctgccttaacttcctctccagagaatccactcctggagggtttcacctcaatcttcgtattcccctggtgcctaagattgcatcttcgagcctgtttagcaaaatgagttgaatcatgaattggtaactatgcagaatcatagtgtcccagtgggagacagcaatggagtgatggtaactctcctgacctcacaccctcctgttcctggctgcaggcactgggaccaggtccgggatgagatccagcgggagtttgatcaggaatctgaaagcttcaccttggagcagattgtggagcttgggatggatcagcatgtggagaaaattggggagatctctgcttcagcaactaaagagctggctatagaagtggtacgacagtcccctcccatgctcccacacctcctgcgcctcctggagcacaggctccagctgttcatcatctgatggcgcctctcagctcctgttccccttagtgaagagatacctgactgctgtgtcccccaatttctctccacaggctttacaaaacattgccaagacctgggatgtgactcagctcgacatagtaccctacaaggataagggccatcatcggctcaggtcaggggagctggggctctaggagaatggagggctgtgtgacccaggctgcagagtgggaccaaggttgggcaggtggggatgaactatgattttgaccccttgtgtctcagaggtacagaagaagtattccaggcactggaagataaccaggtagctctgtctaccatgaaggcatcacgctttgtcaaggcctttgagaaggatgtggaccactgggaacgctgcctctccctcattttggaggttattgagatgattctcacagtgcagcgtcagtggatgtacttagaggtcaggactcagcgcctgagctcttcctgcttcctgctcttactccttctttttcttaagacctagattttgccctgttatcagcctcattctcctacctttaaagtcactcttcatctaggacccagctgtctgattcttagttattacctctcaccttagattccctccgtaacaagtttttgttcttctcagatttttcttccatttttcttcttagacccaggtagctggccccctacctccagctttccttgtagaacttgggcatcttggcctttgacttctagcactctgtatcttctacccaactgtcacccacaatctgggaacagggagcagagggtggagagtgtgtaagaagtggcctctcaccccaacttttggccccctcagaatatcttcctaggagaagacatccgcaagcagctgcccaatgaatcgaccttatttgaccaggtcaacagcaactggaaagccatcatggacaggatgaacaaggacaacaatgctctccggagcacccatcacccaggtcagagctccagggctcctgccctgacacagcctcggcaggcactctgcttggtcatggttgcgtgcttcatttattaaaaagactgatgcccccagctctcctaacatttcccatctccatcacctcttctaagcattagatcataattctgtaaattaaactcaacaaatatttgagtggagtataataatgtagtggttaagagcatgggatatggaatcagtcagatgagtttatttatttattaaaaaaaattttttttttgagacagagttttgcacattgcccaggctggagtgcagtggtgcgatctcggctcactgcaatctctgcctcccgggttcaaatgattctcctgcttcagcctcccaagtagctgggaatacaagcgtgtgccactacctctggctaatttttttatttttagtagagatggcgtttcaccaagttggccaggctgccttgaactcttgacctcaggtgattcacctccctcagcctcccaaagttctgggattacaggtgtgggacactgagcccagcctacgttgactttcttttagcagattaactagccttcagccatgggatggggtagggtatggggaagaaagggatgaacacacggcaagatgaacacatagtgaggcctggtcgactgggggagactggggtagacaatcagggagtcaggtttgacagcgggcacctagaatgggcatcctgtgcagaagaattctggtgggggtgcagaggacctctttattttacctagggctagtcttaacagtgcttcattttcccaagagccttcagtatacacatcaataaaaataattttaattattctgataaaagataaacatgaaaagttatggtatgcaaagttgaatgacaacaactgatactatttgaaataattgacagaattatattccgtaacaatttataagcaaagccaaaaaaacaatgatccctttgttgaatgcacagaacaaatccatcttgtccacggctactgagcatgcctgtgatctccaggggtcactcaggtttgactcaaaggatccaacagcctgtagaccctgtgcttgaaggcatgagggtcacctctgagttcacactcactagtgtccctcctttcttcagaaagctaggaactgggaagacaaggggaaaatcaatcaaggcctgaggtatggggctgtaggctgggaggaaactaacattattgagaagctactgatgtgaatacatttcaattactactcacattggttttttgtttgtttgtttgtttgtttgtttgtttgttttttaagacggagttttgctctcgttgcccaggctggagtgcaatggaatgatctaaggtcaccacaacctccacctcccggttcaagcaattctcctgcctcagcctcccaagtagctgggactacaggcgtgtgccaccacacccagctaagtttgtatttttttagtagagacggtgtttcaccatgttggtcaggctggtctcgaactcctgacctcaagtgatccacccacctcggcctcccaaagtgctgggattataggcatgagccaccacacccagcctcacgttggtttttgagatggattttattgccattttgtacacaaaaaggtcaaaactcagtgaggtgaattgacatgacagtaagtgaaagaactactatctgattgggggtcttctgccgcctgctctgggactctttctgctatgacatgaaggacattggcaaccccagtccttgcagatttctttcactgtgtgcacatgccatgtatctaaataaaattatttagcttgctagattgtgtaagtggagggtaatctctacttttcagaagctcttgggttggccagtggatccccaagttcttcctccagcccttcttttcttttttgcctatgggaaatctaggaagacggacccccaagttcttaggtgggtgtgttatacagtgtcccccccacccactggggatatgttccaagaccccccagtagatgcctgacacctcagatagtagtgaacccaattgccatcaatcagaacatgtttctgttcgtgtctccctcccataaattcaatgctctttccatcttaactaagcacttattacgcactgaggctgtaacttttgcagtttgaggtgtgacagcaaaactatcatgaatttctttttccttcgtcgcagtttcacagatagaagattcatattctgtttttcttctttttttttttgagacggagtctcgctctgtcgcccaggctggagtgcggtggcacaatctcggctcactgcaacttctgccttctgggtttaagcaattctcctgcctcagcctcccgagtagcttggattacaggcacccgccaccacgcctggctaatttttgtatttttagtagagatgggattttaccatggtggccaggctggtcttgaactcctgacctcaagtgatccacccacctcagcctcccaaagtattgggattacaggcatgagccactgtgccaggccagaagattcattcttactgtagatctcagcaaactcagttgagaactttcaccttttcacttaaaggaaggaagctgtttatggaagcactttacggcttctctttggtgtatctgaattggcagcatcactactcttgcacttttgcttacattattaagtgacattagggtcacttgaacacaggcactgctgtgatgtcgcaacagtcgatctgataaccgagagggctactaagtgactcacgggcagggaacctccgcagcatggagacgctggacagagggataattcacatcctgggggacagagcaggatggtgagagattgcatcacactactcagaacagtgtgcaattaaaacctagggattatttctggaattttccattcagtattttcggaccacagttgtctgcaggtagttgcaaccatgggacgtgaaactgtggataagggggaattactgtattaatgaaatcatatatgatgtatcaatgcataaacggtaacatgtacaatagtgcataatgaatactgtaatgaattaacagagagaatgggttgagcatgttagacagtctggggatacttctctgcgtccagaaaccctcatggcagtctgtgccccactgttcaagagctggcaaagaacacagagttggggcatccagatccgcccagggcagtggaaatgaatcaaatgtcattcatcgctcttcttcccaggcctcctggacacattgatagaaatgaatacaatcctggaagatattcagaaatctctggatatgtatttagagaccaagcgacatattttcccccgcttctacttcttgtccaatgatgacctgctggagattctgggccagtcccgaaacccagaggctgtgcagccacacctcaaaaaatgctttgacaacatcaagttgctgagaatccagaaggtcagtagaagtggccacagtgagatgctgggtggcgaagggagggtgttggggtatgaaaagctttggaggggaccctgccctcccaaaaggagggccatgttaattaatgattctcaattctcagggggatagaacttcttagaattggtaatattgagaggaggggagaggagcagtaattatcctcaaaaggccccaggacttctaggcggacaccaagggtgggcaggccaggctctgagtagcttctgctttctgcaggttggagggcccagcagcaaatgggaagctgtggggatgttctcgggcgacggcgagtacattgacttcctccactcagtatttttagaaggccctgtggaggtgagttgtggtgagggtctgaggacctagctgattcttcttcctacagaaagttcacctgggtcgggcgcagtggctcacacttgtaatcccagcactttgggaggctgaggtgggcagatcacctgaggtcgggagtttgagaccagcctgaccaacatggagaaaccccgtttctgctaaaaatacaaaattaggtgggcgcggtggcgcatgctggtaatcccagctactcgggaggctgaggcaggagaatcacttgaacctgggaggcggaggttgtggtgagctgagattgcgccattgtactccagcctggggaacaagagtgaaactccgtctcaaaaccaaaaaaaaaaaaagaaaaaaaaaaaaaaagaaagttcaactggctccatgaggagagaagacctctttaaatggccgttagtcactctttcccatctcacctgccattcctgacaatgaccatctctgctctgaaccgaaatttccttctgaaagtcagatcatctgcctcctagcctccatttctctcaggaacgcaagccagctgttggccattcccgcttttctctgggtacaaagccctgaagtgctgctccataagtgccttccctgtggaggaccttggccgtgccccctcaggctgagctgccctattctcccacctccccccagtcctggcttggcgatgtggaacagaccatgagggtgaccctgcgggaccttctccggaactgccacctggccctcaggaagttcctcaacaagagggacaaatgggtgaaggagtgggctggccaggtgagctggggtcaacagaagtgagggaacaaggggctgggcacggtggctcacgcctgtaatcccagcactttgggaggccgaggtgggcagatcacttgaggtcaggagttcaagaccagcctggccaacatggtgaaaccccgtctctactaaaaatacaaaaaattatctggtgtggtggtgtgctcctgtagtcccagtttctcaggaggccgaggcagaagaatagcttgaacccagtaggtgaaggttgtagtgagccgagattgtgccgctgcactccagcctgggtgacaaagcaagactctgtctaaaaaaagagaaaaaaagaaagaaatgaagaaatgagggaacgagaagatggagttaaaaggaggtggccagtggaaagacagaatcttgagtctcacacagtgtggtttcttacccccctttctgagctgtggctctggtacactccaagctggacccttagctcctgacctgaggcccatgtcccatccttcagagcagattgggtgcagttgggagaggcacatggttcttgaattagctgggacttgggagctgggctgtgcgtgtagccaaggacagggctttgggacgtggcttctgcacatccccaggtggtgatcactgccagtcagatccagtggacggctgatgtcaccaagtgcctgctgacagcgaaggagcgggcagacaagaaaatcctcaaggtcatgaagaagaaccaggtgagaggctgggcgcactggctcatgcttgtaatcccagcactttgggaggcagaggtggtaggagcccactcgcttgagcccaggagttcgagaccagcctgggcaatatggcgaaaccccttctttaccaaaaaatacaaaaattagctggtggcacacccaggaggttgaggctgcagtgagctaagatcgtaccactgcactccagcctgggcgacagaacaagactctgtctcaaaaaaaaaaaaaaagaaagaaaagaaaagaaaagaaaaaagtaggtgggtgctctgcaagtatgggctaggcctggagctagaattgcagggagggagcagtcagaattagaggtgagctggtggaaaagggccagagcgagggtgctttatgatggaagtccagtgggggcagtccgtggtagagcagaattaccaggagttacagcaggtggggtcagcaccgggttggaagcggtgctgggtaggggcaagggttgatcaggctttggcggcattgctctgtctgctctcttccctgctgcttcatgccacaggtgtcaatcctgaataagtattcagaagccatcagggggaacttgaccaagatcatgcggcttaaaattgtggctctggtgacgatagaaattcatgcccgggatgtgttggagaagctttacaagagtggcctcatggatgtcaattcctttgactggctcagccaacttcggttctactgggagaaggtgccagatgggccacctccccactctcttaccgtaaaatggatcctaatgcttttattgcatccatgttctgtaaatgcaaggatatcctaagccaacccttagtcctgtcccactaccctaatccggttcttccttccatctcctccccacaatcaggagtggcaagtagttgtcccagtcagggctcactatgaatgtcacttgaacaggactcagaaacactccaggcagctgctgcattgggtcggggtggatgtgcaacatgaaacccattttccatcttgcccataaaccgctccccttttcaactctaaaagggaacccctgatcccttcactgcagcctccctgacaactctgagccccactctcagtcattgtcccagctctaactctccttccaagcccacctctctctttttctgcgctgttttccccaggatcttgatgactgtgtcatccgccagaccaacacgcaatttcagtataattatgagtacttgggtaactcgggccggctcgtcatcacccccctgacggacaggtctgccatgtgggatgaatgaggtggctggggtggggggcagcagaagctgagagaggcttccaggagtctgactctagttctgtcctcaattctcaggtgttacatgacactgaccacggcattgcacctgcaccgagggggctcccccaaaggccctgcaggcacaggcaagaccgagaccgtcaaggacctgggcaaggccctgggcatatatgtcattgtggtcaactgctctgagggcctggactacaagtccatgggccgaatgtactcaggtctggcccaggtcagtatcctgccaccctgtgccagaagccccttaaataccttttcgtcccagaaaataaactgaaacccaaatctggttcagtgctttgtagcttcatgacattgcatcacatgtaattcttatttatttatttatttattttttggagtgcagtggcatgatctcggttcactgcaacctttgcctgctgggttcgggcaattctcctgcctcagcctcctgagtagctgggattacaggcgtgtgacaccaagcccggagaatttttgtatttttagtggagacggggtttcaccatcttggccaggctggtctcgaactcctgaccttaggtgatccacctgtcttggcctcccaaagtgctgggattacaggcgtgagccactgcgcccagccacgtataattcttacaactaggaaagtcccttccccttcctgagcttcatgtagcttatttgcaaaatcagaagattataaaggattaaagaaaataatgtgtgttaactggagcagagtagacagtgcacacaagttccctaccccagtctctttccaacccacaccttttctagcatcaccccagattggccccatctgatggaaagttctggccagaagctacaacagtgtactctggtgccctcctccctgccccctagtctggaggccgcctcgcctattgaaacatttgaaggaagggtgcgttaatcacgctttctagcctcttggggcacctctcgctcccagtgactctgccttgcaccccgcagactggagcttggggctgctttgatgagtttaaccgcatcaacatcgaggtgctgtcagtggtggcccaccagatcctgtgcatcctgtctgccctggctgccggcctcacccatttccattttgatggctttgaaataaatctggtgtggtcctgtgggatcttcattaccatgaatcctggtaggtggcagggagtggatgggactcctggggtgggaagaactgggtgttcaggggaaataactgcgcatcctcctcttcccccttccatgcgaatgtatatagctaagtgaagtctggctaaagatagcaaaggggagagaaggataaacacaactttccgggagaaggggaagcaatcttactgttttccccaaagggattaataaccacttatgtgtgtatatgtagccctcatcttttaagatacttagctttcttctccctttaggctagctccaagagttctggtctctctgccatctcttttgcagcaggctctagggtctctcattactgtttcctaggaacaactctgggggaagggtctaggacagcacagggataggaaagggtttaggaactgaacaaagaggaacagctgtgatttctattaggactgatgagagctatacacacagaacctggagagatgggaaattgacagctctgtgatttgagtttgaaacaaggccatgcagaaagtaaggaaaggaccagagataagagagaagaccaaagtggactgggaagggctggggctgagatgagaaaggatgtggtcttggagttggagagaaagttagggatggagttagggtgggagaaaatgagactgattggaaagtgggtttggggaagcaaatcaagatgaggaaatatatgattctaagcaagtggcattgttttccaggctatgctggccgcacagagcttcccgaaaatcttaaatccatgttccgcccaattgccatggtggtgcctgactccaccctcattgcagaaatcattctctttggagagggctttggcaactgcaaggtactccaataaccccttttctccagtgattttaatttcctttcataattattccctggacagaggagctccccaagggcctcacaatcagcttatcctctaaggaacttagactattgtcagtaggatgtgtggggagaaaaatttaggggagggaggtgtctcctccgtgatatcactaactgacaatggcgtcattcacacaatttcctcaggagaatccatagagtgcctcctagctgcttcatgtcctgggacctggcttcttgtctctgactgtcctgagatgaagcagagggatttgtggggagatggactgtttcctcctctgttttggttccccagattctggccaagaaggtgtacacactctactcactggctgtgcagcagctgtccagacaggaccactatgactttggcctgcgtgccctcacctcccttctgcgctatgctggcaagaagcgccgcctacagccggatctgactgatgaagaggtagagcaaggacacagcctttggacctgacttccactgtcactggacctatgtcacttctctcaagtctttcagaccctttctttcctcagattgggattctcaccttcccacctcgtcccatccccgtgttgcccgctgctttgctaatggctaactggtgtatccattgttcttggcacgtgccccgaagccctttggaggtgaaaggcctaggccctgcctcctcaagcctgagtctctgtcttttcccattcaggttctgctgctctcaatgagagatatgaacatcgccaagctcacttcagttgatgcacccctgttcaatgccatcgtgcaagatctgtttcccaacattgagctgcctgtcattgactatggcaaggtatttgttccttaatactctccctgaccgggtgctgtggctcatggttgtaatcccagcactttgggaggccgaggtgggcagactgtttgagtccaggagtttgagactagcctgggcaacatggtgaaaccctgtatctacaaaaagtacaaaaattagccaggcatggtggtgcacacgagtgtagtcccagctactcgggaggctgaggtaggaggattgcttgagccccaggagattgaggctataatgagctgagattgtgcctctgcactccagcctgggtgacagagcaagaccgtgtctcaaaaaacaaaacaaaaacaaaaaaaccgcactctccctgaccacatatgtgaatatgcatctgggaatagaaaacttggcttccagtccttgttctgccatctactagctatgactctgaacaagtcaattgacctctctttggacttccttatctataaagcaatagactattcaaacattctgctctctgaccacaactccctcctccgctgacctactcaagtgtacctgctcaagtgcatccatgcagcaacgctctgacttcattgaaacctctagtccgttgcctttgcactttctccgtgcccatcagtcctccatgcctctacttctcacctcatcagggagttttgaggaggggctgctagaagccatttggtatcagagagcagcagaatggaagagggagttttagaaagcataagaactttcttctctggcagtgtggtagtctagataccctgaatgatcctttcaattgaaactactaaaatgatggataaaaatataataataacatcctttttaatgcattgctaagctggcaagaaaggaagaattccaggagttgaggagggtagggagtaaaagcaggaaccctgggaggcaggtaagtaccaaagctggccttctccctgaaaactgttgttgatcttaaggcagtgaggataggagatgaaacaacccaagtctgaagatataacagaagatgcagtgctgcataaaccccagtccccaaggggcaacatccccagtagatggaaaaacgagaagtctgagatttagaagcgtatatacaggaaagaaacttgcttgttttgacctctgatgatggaagaaaaagaccaaattttctttgagatttcctaaccacacaccagctctcacatggtttccagtcatcatttatcctactgtgtaatcagaaaagaaatctcaagcttagatttcaatattaagtagttctaggttgttagtgcccccaggtgactggaagaagcaaaagcaaattatttctggaggaatgaaatttcaactcacacttcaaagaagtgccacaggtaaaagtccaagaaaatgagcaactcatggtcaaaaatcacaaaacacacaaggaaacaagaaaccatgaatgggagccagaagaacaacagacagtggaatcagatccatgaaaacttacttcagatattgaaactgataggggcgaggtgcggtggttcacgcctgtcatctcaacactttggaggctgaggcaacaggatcactttaggctaggagttcaagaccagcctgggtaacatagcaagacctccatctcttaaaaaaaaaaatagccacacatggaggtgtgctcctgtagtcacaactactttctccaaaagctactagaaaaacgtgctctacttaaacacaggaacacatcgtgaaaaggacgatgggaaacaaaagatttggtgcaagggggaggctacagtaatcctcggggtgttggtgaatggaggtcacaggatgatggtggtgcactgggcaaagagagaagccaatccagactggagcaaacctgaagtcttcaggaggactgtttttttgttttgttttgttttgtttttttgagatggagtttcactcttgttgcccaggctggagtgcaatggcacaatcttggctcaccgcaacctccgcctcccaggttcaagcgattctcctgcctcagcctcccgagtagctaggattacaggcatgcaccaccacacccagctaattttgtatttttggtagagacggggtttctccatgttggtcaggctggtctcgaactcccgacctcaggtgatccgcctgcctcagcctcccaaagtgctggaattacaggcatgagccactgcgccgggccaggatgactttttaaagaagaaattgatacccgatgtgaaaattgtttgaaagatttagtcaactggtagagtttggaattgagttagagataagcacattaaaaactaagcaaacatgggggcaaaacaaaaacaaaaacaaaaacaaaaccctaagcaaacaggctggacatgatggctcacacctgtaatcctagcactttgggaggcataagcaggtggattgcttgaggtgaggagtttgagaccagcgtgggcaacatggtgaaaatgagccaggtgtaatggctcatgcttgtagtctcagctattgggagggctgaggcaggaggattgtttgagcccaggaggtggagattgcagtggctgagattgtgagattgtgccactccagcctgggtgacagagtgagaccctgtttccaaaaaaaaaaaaacaaaaaacagaacctaagcaaacaaaaatcacaaaaactattagatcctagggaaaacaaaaaaagttgcccaagaaaggaaaagtaaccatacattgttatactgatactttataatgtttacaagagacccatctaaagcttaatgacaaagggctgaaagtcaaagaatagaaaatgatgttttttctattatttgataattattagtaaataattagttttagtaaatacgaatcaaaagaaagctagggtagcaatatgggacaacagattttgagctaaaaagcattgctagaaatagagggctatttcataataataaaagtttcaactcatcaggaaggtataacaattctagatttttgtgcatctaataatatagtctcaaaataagtagagcaaattttgcacaattacaaggagaaagagacaaatctagtatcatagtggagagcttaatatttcttaattgatagagcaaacagactaaaaatcaggatatagaagatttgaagaacacaatcaacaatcatgatttaatggatatctatagaaactggactcaataattggagaatcggccaggcatgttggctcatgcctgtagccccaggactttgggaggccaaggtgggaggattacctgaggtcaggacttcaaggctgcattgagccatgactgtaccactgcactccagcctgggtgacagagtgagacctcaactcaactcaataaaataaaataaataattgaagcataaccatatttttcaagcacacatagaaaattgttggaccatgtaggaaaaggaaaattgatgactatgtaaaggccataaatttgcctcaaaaatgtcaaaggaagatattcagaccacagtttctgatcacagtgataactctactgctatcaggcaaagcagactttatggcaagaagcaatcgtaaaggtgaagagtgacatttcataatgataaaaggatcaatacacagaaagttataagagttctaaatctgtatgcactaaataatatagctacaaaatccataaaagaaactggacagaaccataaggagaaacacataaatccacagccctggtgggagatcttgacttacttcttttaggaacagataatgcaaacagaccaaaaaatccataaagagatgcatttgaatgcttttaacagacagtgacaaaatagaaaaagcccgagtgtttggaaatttggcaatacaattctaaataactaatggatcaaagaagaaattagagaatttttttttttttttttgagatggagtctcaaaaaaaagctctgttgcccaggctggagtgcagtggtgagatttcggctcactgcaacctccgcctcccaggttcaagcgattctcgtgcctcagcctcctgagtagctgggactacaggcacacgccaccacacccggctaattttttgtatttttagtagagacggggtttcgccatgttggccaggctggtctcgaactcctgacctcaggcgatctgtccgcctcagcctcccaaagagttgggattacagacgtgagccaccgcgcctggctgagaatattttttaactgaataagtagaaaatgtgacattaaacttgtttaggacactaaacacatgtgcacacagaaaacatactaataaaactacttctcagatagtggaaggaagtggaattagtgaggcctgttagtgcaagtaactatcttgtatctatttgaaaatatttggctacatgagctgtgtgtttaaaaatggcacactattctggggcccatctgttaggtcatggttcttcaagcattactttttaacttaggtaataatgtctttactattaaacgggctcttccaccaaactgtgagctctgcaataggacgaaatctattttgttccaagccgtatctgtggcaaccagcacagtgcttggcatacattgtacaggcttaataaatatttgctgaataataacaaaaagtgtgtagagctacatgtaagacactgtgtcaatgaggaaactgaggcgtggagaagtaacttacccaggatcacatagctgagagctggggaaccaggctggcggactccagagcccaatctttcaactctgcaatgggccagcttcccaatgagtgaacagagccggagtgcagagggccctggtgccatttttaacagtttgaacgtattctctctggcaccggggagattttgaaagccctttaaaggcctcatcctttttcttctgcttgctgtgttttcccttccctcagctgcgggagaccgttgagcaggagattcgagacatgggcctgcaaagcacgccgttcaccctcaccaaggttttccagttgtatgaaaccaagaactcccgccactccaccatgatcgtgggctgcacgggcagcggcaagactgcctcatggcgcattctacaggcctccctgtcctctctgtgccgcgccggagaccctaacttcaacattgttagagtacggggctgggacagtggagtcagtgggcagagacttgagtagtaagaagacaatggagggtgggggccagggaggaccttgcaaggccgggagagctgtacctgggaccatggtggcctggagcgatgagagaagggacaaatgcacgtacctaagaggggtctggaaataaagaggggtttttgtccatcagcagctaaaaccccttccggtgtcattttcaggagttccctttgaaccccaaggcattgtccctaggggaactgtatggggaatatgacctcagcaccaatgaatggacagatggcatcttgtccagtgtcatgcggacggcatgtgcaggtatccagaggatcgtggggtgtggagagcagacgcctgagtctcctaagggggcagggagtctggggataggaagttccaagttgggagagaaatgcctggggaatgctgaagtacaagggagtgtaggcttgtgtctccgaggagcgtgagcggagggtgcaaggtgagcggctccccggtttcctcatcacccaccatctactcagatgagaaacccgacgagaagtggatcctgttcgatggccccgtggacacactgtggatcgagaacatgaactccgtcatggacgataacaaggtgttgaccctcatcaacggcgagcgcatcgcgatgcccgagcaggtcagggacgcggctgactcctggaggcctgcagaggcaggcaccggagggcgtgggccggggctggggaggagagccagaaatctcagagcagggcaggttctgtgggagagagctgaaaggtggatgcctggattcagggaaacctgcagctgaagaaaaatgctttgcttgccgcggctgttgagaacaatgataagaaaaacaccctctgttgtaagcactgtgtaggcttgggcggccctcctcggctcgttctcacggatgcatgaggcaggaccctcgtttgtgcacccagaggtatgaattcacggactggcaagcacacccttttccacccactccaacaatgcgagcaagagagtgatttttcaaaaggacaaccttgaataagctctagtttcttttaaagcaaactgggccgggccgggtggctcacgcctgtaatcctagcactttgggaggccaaggtgggcagatcacttgaggtcaggagttcaagaccagcctggccaacagggtaaaaccccatctctactaaaaaatacaaaagttagctgggtgtggtgttgtgcacctgtagtcccaggtactctggaggctgaggtgggaggattgcttgaacctgagaggcggaggttgcagtcagccaagatcacgccactgcactccagcctgggtgacggagtgagactttgtcttaaaaaaaaaaaaaaaaaaagcaaatcgtttgtgaacttgtagcatccgagttccgggtgttttattattcctgaaggtgggggatgcagagaaagatgaagttctgacaaacgtatatccttaggtgtctctcctgtttgaagtggaggacctggcaatggcctctccggccactgtatcccgctgcgggatggtctacactgactacgctgacctgggctggaagccctatgttcagtcatggctggagaagaggccaaaggtatgaagggaactgaggagagggaaagtaaccagggtggctccaggacacaagggtgaatgaagagccccttcttattcaactccaggctgaggtggagccccttcaacgcatgttcgaaaagctcatcaacaagatgctggcctttaagaaggacaactgcaaggagctggtgcccctgcccgagtacagcggtatcacctccctctgcaagctgtactctgccctggccacgccagagaatggggtaaggggaggacacagaccacgggcaggggcagggggtgctcacagcctcaccagaacaacttctgggaaacggcgtgtctgagacaggttgaactccaggcttgagtggagcagagactccagggggaggcttcaacgaccatggaggcagtgaggggtgtgtgtgtgcatgtctgtgtgtgtgcacgtgtgcattgagctgaaaggtctgactaggggttctgaattgaatatgtacacaatgggatctcactataatttcccacccatgctttgggagctgaaaatagctcattccgctcctcacttctccatcccttcaaaatataagttttggcgtagatgaggccctgggacaccatttctcctagaagaagctcccaggctattctgatgagaggactttttaaacatttcagattaatctatatttaagaaaaactgtgctcagtttagaagtaaggaccaaaatttgatatcttctgttgagattaaatcactgcctataaatggtttgtattgtttttaaagatgttgctaggtaattaaactattaatatgtcatcaacaattaagatctgtaggaacatatgtcattcctggtacagttaatgtaaattaaaaatatgtagatggggctgggcacggtggctcacgcctgtaatcccagcactttgggaggccgaggtgggtggatcacctgaggtcaggagttcgagaccagcctggccaacatggtgaaaccctgtctctactaaaaatacaaaattagccaggtgtggtggcacgtgcctgtagtcccagttacttgggaggctgagacaggacaatcgcttgaacccaggaggcagaggctgcagtaagccaagattgtgccactgcactccagcctaggcaagacagagcaagactctgtctcaaaaaacaaaaacaaaaacaaaaaaccgcagatggacttgccaggtactgtgtgggcagagggcagttacgagttatcaatggcccacagatgtcaagaaggacgggctgggtaggggaggcttcccgggtgagcagagggcaagagtggcctctgcagaagtgcagacacacaggagtcaggcctggcagggcgggccgagctggtggtctgtagccggatgtggtgggtggtgtttttgtgtagatgcgcttcagcgtggcagagaccctgaggagagggctggaccatgaggatggtgagatgggttgtgtgctgagaaaggctgggagcacagactaaggattctggactgaaaatggcagacaattgattcttaacataatttcccacctataggattgaggaatactctttttttttttttttgagatggagtctcactcctttgcccaggctggagtgcagtggcacgatctcagctcaccgcaacctccgccttgcaggttcaagcgattctcctgcctcagcctcctgagtagctgggactacaggtgcctgccaccacacccagctaattttttgtacttttagtagagatggggtttcaccttgttggtcaagctggtcttgaactcctgacctcaggtgatccacccacctcggcctcccaaagtgctgggattacaggcgtgagccaccactcctggccaggattgaggattactctctaaacccaagatcggtattctggattggacgcaccaagtgtatcacattatctgtggtcctaggtatcttaattcacaacccatcctcaagcgctctccacccacgggcctgtgtctgctttgcatagtaaagcagactatccctttgccagggatggtttgaaggatgccgagtttgctgtctgtggtctccaagaggcctgagagaggtgggatggccccatgtgctccatgcgcccagtcagaagaaagatatctgtcacgtgccctctgggcagggggttgagagcatgggctctaaatatgctctttccattattaagttggtacattttacattttatctttttggagatagggtctcactctgttgcccaagctgagtgctgtggtgtgatctcggctcactgcagcctcaacttcctgggctcaaacaattctcctgtctcctgagtagctgggaccgcaggcgtgcgccatcacacccagctaatttttgattatttctagagatggggtctcactgtgttgcccaggctggtctcaaactcctggactcaagtgatcctcctgcctcagcctctcaaagtgctgggactagaggcatgagccaccacaccaggccacattttacattttaatttttaattacacagataattgttgaatcaagttccctttctgaaaataataatttttcatataaagctaaagtcctttttgttcccctctctcctcccagtcctgatctgctcctcactccacacaagtaactactgtagtatgtttgtgtatgtcattccagacctcttttttaatttttttttttttaagagacagggtcttgctctgttaccaaggctggaatggcatgatcagggctcactgcagcctcaacattctgggctcaagtgatcctcccacctcagtctcctgagtagctgagattacagatgcacaccaccatgcctggctttgttgttgttgttgttgttgagacaggtttcactatgttattcaggctggtcttgaactcctggcctcaagcaatactcccacctcagcttcccaaagtgctgggattacagtcatgagccaccatgtctggcctaggcctttttaaaggtacacctttacctataataccatgggtatccatagaaaatatgttttttgtttttttttttgtttttggagatggagttttgctcttgttgcccaggctggagcgcagcggtgccatctcggctcactgcaacctccacctcctgggttcaagcgattctcctgcctcagcctcctgagtagctgggattaacaggcaccaccacacccggctaatttttgtatttttagtagagatggggtttctccatgttggccaggctggtctcgaactcgtgacctcaggtgatccacgcggctctgcctccctaagtgctgggattacaggcatgagccaccgtgcctgactgaaaatgtggtatttttttttaaaactatatcatgctatatactgcaacatgtccgttaaattaacaatatgtttttgagttctgtattactacacgtagattcatttcattgctttaactgctatatactattccatgatagaacactacattttatttttccactgctctactggtgaacatttcagtcatctccagtgttttgcaattacaaacaagtcactatgaatgttccgggacctgtctcctgagcacccttggttgcttttccagggcaggcctgttgtggccagatgatggctgcatcttcatgagttagcagtgaggaagctcagggcaactgctgagctataagaaatttcaggtttgtctgtctttcagcaggttgtagataaacatccacatttggaaaactgtgcgattttccaaatagagccagggaaggaggaagacccaggctttccacactctggtgtcacgagtctgccagatggacccctggtctcttacaggtgggttatttcctcttctcgttctccatccaggtgaacccagctgacggcgagaactatgtcaccatggtagagatgacatttgtgttcagcatgatctggtctgtgtgtgcctctgtggatgaggagggccggaagaggatcgacagctacctccgagagatcgagggctcctttcccaataaggttgggcgcacacctggctgtcctatttgccctgtttttccagaccccctgggcatcccccatctcaggctctgcttgggtttccctctctctttcttccacccggtggtctggggcccgttctctgggctggagaaggctcaaggaaggctttggtaacctgacctacatgccctccttaggacacggtatatgagtattttgtggaccccaaaatacggagttggacatcatttgaggacaagctccctaagagttggcgctaccctccaaagtaagagctgggcctgggtgtgaggagggcatggggcagcggtaggtgggggatgtggcaagagagatggggcctagaagcaaaaatgagcaataggaaggagaaggtgggtcccagagaagggctgcctcttgaggacaggaagcgggacctagagggcttgggacagggtctctgaggggagcacatgatccccaggccccacaggagggcagggtgctgatgagacagtggtgacgtagagggaaaggaagtgggagttggaaaggagtgggcggctggtccttgagagccggcccctgctcttccctagcgcccccttctataagatcatggtgcccaccgtcgacactgttcgctacaactacctggtgagcagcttggtggccaaccagaatcccattctgctggtgggtcccgtggggactgggaagacctccatcgcccagagcgttctgcagtccctgccctccagccagtggtcggtgctcgttgtcaacatgtccgcacaggtgtgtcggggatccaggggccaggctgccggctcccttgggatccaagtgcctgcctgaccctcctctctaagcccgtatttctctcaggggacccacacattcattcggtaccttttcaccagaccacatccaataacgtgcagagcatcattgagagcagggttgagaagcgaaccaagggtgtctacgtgccattcgggggcaaaagcatgatcacctttatggatgacctaaatatgcccgctaaggacatgtttgggtcccagccacccctggagctgatccgcctctggattgactatggcttctggtatgaccgtacgaagcagaccatcaagtacattcgagtaagcctcgctagagtctgttcttcaggcctctgctccttctgggataggctcagtccccactccactggggccccaggctatggtcctgtcatcttggattccttcccacacaggagcgtccttctccatgacagcagttctcggctccccactcacgagccaggcatcctccctcagtcctggctccttcgtgggattctgagcatattgtttgcctgcttgctttttctttctttctttttctttctttctttctttctttctttctttctttctttctttctttctttctttctttctttctttcttctctttctctttctttctttttctttcttctctttctttctctttctttctttctttttttctttctttcagacagcatcttgctatgttgccaaggctggggtgccgggttaattttatgatttttagtggacacaaggtccccatatgttggccaggctggttttgaactcctgggctcaagagatcctcccatcttggcctcccaaagtgttggcattacaggcctgagccatgctcccggctgcttctctttaatcagcggccatcgcggcctggctcctggggttgtttgtgtgtatatctggcactcagggccaaaaactcgcctagtgctatattcatgtgtgtttgagagagaacatacacacacacgtgtatagataggtacaattttaaaagaagaaaaagagaaaaagaagaaagagaaagtctagaagacacaaatgtttttttacttacctgtattttctcatttgggtacatggattataaggatgaaatacagacaaatgcattcctggtactaaaataagtttcccatgtcccttccttctcttcccctccccctgccctaccactccatgttcctctcaactcgctgcatcccggttcctcttcccctttgtccctcctcgcactgttttcctcccactccttttcacctggcctgtgtcggcgcctctcttgccctctcccctcctgcctgtctgccctccttgtcgctgctctctaggaaatgttcctgatggctgccatgggcccccctgggggtggacggactgtcatctccccaaggctacggagtcgcttcaacattatcaacatgaccttccccacagtgaggacctcatgggggctgcaggacgaggggagggtaggaggtgaaacgtgtctgtctcagagaagcaggggccagatcccagggggctgcggcaccccaagtggagctccacgcaggacgctgggacgatccgtaagggcatgtgctggctcctgagctaggagagctacgggttggaagcgtaccttcctggctgtggacaaggaagccttgtagtcccaatgggcagagaacacagtgaagcccaagtagactaaggaaggtagatcctacaaagcccacggcagtgtcaggattagagccaggccagcaagtcacttgtctcagtgcagaatttaagggggcacccaaaagactctgtaatcaggagaaataatatgttaacacttccttttttttttttttttttttgagacagggtctcactctgttgcccaggctggaatgcagtggcatgatctcagctcactgcaacctccacttcccgggttcaagtgattctcctgcctcagcctccagagtagctgggactacaggcgcccgccaccacgcccagctaattcttgtattttcaatagagacagagtttcgtcatgttgcccagtctggtctcaaactcctggactccagagatccaccaacctcagcctcccaccacacttggcctcacttttttttttcctgtctatgacattttattgatcctatggagtgggaaggagaactggagaagtatgtggggccaagggatcccaggggaacagggaaggtattgaggcttggccactagtactggcgagtctgtagtaatgcaatattttttaaaattaaaattaatgccaataatttatgatgagcaaaataccaccattttgaataaatacaaaatcagtagagtacagtgctaagccatattggagcctaaggggaaaggagaaatcagtaatccccatctggtctttattttaaatgtttgtgtttgttcctcatgaatattttgcattcatttttgtttttaaatactgtgttggccaggcacggtggctcccagctgtaatcccagtaccttagtaggctgaggcaggtggatcactcgagcccaggagtttgatatcagcctgagcaacacggggaaaccctgtctctacaaaaaaatacaaaaattagccgggtgtggtggtgcacacctgtgttcccagctacttgagaggctgaggtgggaggattgcttgagcccaggaggtcgagcctgcagtgaaccatgattgcaccattggacaccagcttgaatatatatatatataatatttatatatatatatttattttatatacatatatatatagtgttaaggctgggcgcagtagctctcgcctgtaatcccagcactttgggaggccaaagcaggtggatcacctgagattgggagtttgagatcagcctgaccaccatggagaaaccctgtctctactaaaaatacaaaaaattagctgggcgtggtggtggacacctgtaatcccagctacttgggaggatcaggcagagaattgcttgaacccgggaggcggaagttgcagtataaataaataaataaataaatataaatatgtataaatatatagtatatatatatatagtgttatataatagtatttgtcagttgtcttatttctgagtttaggattttttttttttttttttttttgagacagagtttcactcattgcccaagctggagtgcagtggcacgatgttggctcaccgcaacctccgcctcctggggtcaagtgattctcctgcctcagcctcccaagtagctgggattagaggcatgtgccaccacgcccggctaattttatattttttagtaaagacggagtttctccatgttggtcaggctggtctcgaactcccgacctcaagtgatctgcccgccttggcctcccaaagtactgggattacaggcatgagccaccgtgcccggccctaggattttttttgacacccccttaaattgtgcccatgagccaagctctttattggcttcccctctggctagaaggccagcagccctggagagtgagccagggtctgtttctagaagtcccagatcatccgcatattcggcaccatgatcaatcagaagcttcaggactttgaggaagaggtgaagcccattgggaacgtggtgacagaggccaccctggacatgtacaacaccgtggtacagcgcttcctgcccacgcccaccaagatgcattacctcttcaaccttcgagacatctccaaggtgactcgcggcctgaccttgccccttctgcttggcccagcctccgcggaggctttctcttctcaaactaagccttaacactcactagcatgcgcaccaaaagtcacccccatgctgaagtgccacactccctggccttacctttaaaacttctgggccaagtgcggtggctcacacctgtaattccagcactttgggaggccaacgcaggcagatcacctgaggttaggagttcaagaccagcctggccaacatggtgaaatcctgtctctattaaaaatacaaaaaaaaaaaaaaaaattagctgggcatggtggcacgcgcctgtagtcccagctacatgggaggctgaggcaggagaattgcttgaacctgggaggcagaggttgcagtgagctgagattgcaccactgcagtccagccttggagacagagtgagactctgtcccaaaaaaaaaaaaaaaaaaaacttctggagggaatctttttgctccctggtcccaacagtcagtcctcttcccaggtgttccagggcatgcttagagccaacaaggacttccatgataccaagtccagcatcacacggctctggatccatgaatgtttcaggtgacatgcatgtgccctggccaaacgaaggcttcctcagccttgctcccacccctactttgttcccagcctgacactgccttccccaggccattctcctctttattccccgatctcaccccagttccctgcccacagagtcttctctgaccggctggttgatgcggcagacacagaagccttcatgggcatcataagcgacaagctcggctccttctttgacctcacatttcatcatctctgtcccagcaagcgtcctcctatctttggtgagccaggagctgtgatgaccttgggcttgacactcttagaacatcggggctagaaggagtcagggcatggggtctgaagtgtggagccctgtggggggaggcaaaccaggcatttgtgactctgatcccctcttcccatggctcaggggatttcctgaaggagcccaaggtgtatgaagacctcacggatctgacagtgctgaagacagtcatggagacagctctaaatgagtataacctgtcaccctctgtcgtgcccatgcagctagtgctcttccgagaggctattgaacacagtgagcacctgccacgcctatccccttccccatcatctcagtgatggggtatgtctaaggaaataggggtcccttcccaggtctcccaaatcaagttccagaagctgcctttctccctggccccagatgccctgtggcagtgtgtgtttaacagagaaggtggaggttaaaagttgaattgcctcctgggccttgggcaccaacttcttctcatacctcttggttcctctgcttcagtttcaggggccccaatccctagcctagggcctggaggtcccctgagtttgctcagccaactcattaccctcacacccaccccacccccagtcacacggatcgtgcgggtcattggacagcctcggggcaacatgctcctggtgggtatcgggggcagcggacgccagagtctggcccgcctggcttcatccatctgcgactacaccaccttccagatcgaggtcaccaaacattatcggaagcaggagttccgagatggtacggctgggtttctgaaatgctaggaataaaagatcagatgcatacattcctgcagtgacaagagaggagagatggcagccagatgggcagacgtgtctggcccgtgttgggtgtaggatggtgtcgcgtgtatgctgcggggcggggagggttcctaaatctcagaaaaggaatcaagcccaggatggggaatctgcagtgagtttgtcctccttccctcccccggccagatatcaagcgtctgtatcgccaggctggggtggagctcaagaccacgtccttcatttttgtggacacccaaatagctgatgagtccttcctagaggacatcaacaacatcctcagctcaggcgaggtgcccaatctctacaagcctgatgaatttgaagaggtaggattccttccacacccttgaccagtcagttctttggcctgcctagctgaccccagaaggaccacagctcccagaatgtgccactggcacacccccactgccacacccccactgcccacctcagccctgtaaggtggaaggtcccctccagggaccctgggcagagctgctttaaaacccacgcttcagagccaggcacagtggcttgagcttgtagttccagctactcgggggtggggggtgctgaagtgggaggatggtttgaggccaggagttcaagtccagcctgggaaacacttcgtcagccccacctgacccgctgcccccgctgattctgctatggacacgccagccctctgaccctgggtggcttctgtccagatccagtcgcatatcatagaccaggcccgggtggagcaggtgcctgagtcatcggacagcctcttcgcctacctcattgaacgcgtgcagaacaacctgcacatcgtgctctgcctcagccccatgggggatcccttcaggtgacttctgtgacatccttctctcagccccttctgtgtgctccctcaccctgctgtggcctcctgtgccttctggaaattagtgtcaggaataacagcaggctcctctgcccgcctcacccatctcctttccttaggctgtgcctgatttcaggaagttcctttggtggacatgggagtcgtccatccttttttggcataactagatttttgtttgtttgttttggtgggtggctttttggttttgttttgtcattgtaaatctaattgtggttaaaaacacacacacacaggccgggcatagtggttcacacctgtaatcccaacactttgggaggcctaggtgggtggatcacgagatcaggagatcgagaccatgccggctaacatggtgaaaccccgtctctactaaaaatacaaaaaattagccaggcatggtggcgggggcgcctgtagtcccagctactcaggaggatgaagcaggagaatcgcttgaacccgggaggcagaggttgcagtgagccgagatcacaccactacactccagcttgggtgacagagcgagactctgtctcaaaatacacacacacacacacacccaaaatgtatcatcttaatcgtttctgagtgcagtgctcagtcgtgtgaagtacactcacactgttgtgtaacagctccagagctttctcatgctcccgaggccgtactccatacccatgaaaccattgctccccattccctccccagctgctgtctcttgagtctgacatcagatgcctcacataggtggaaccatgccgcacttgtctttgtttctttttttgtttgagacggagtctcgctgtgttgcccaggctggagtgcagtgctgtgatctcgactcactgcagcctctacctcccaggttcaagtaatcttcgtgccttagcctcccagtagctaggattacaggtgctcgccaccatgtccagctaatttttgtacttttagtagagacagggtttcaccatgttggtctggctgatctcaaactcctgacctcaagtgatccacccgccttggcatcccaaagtgctgggattacaggcgtgagccaccgcgcccagctaccatttgtctatctgcgacttgcttatttcacttagcgtattgtcctcaaggttcatccatgttgtagcatgtgtcaggatttccttctttttttaaggctgaataatattatcttgtatgtctataccacattttcttgatatgactagatttttaagggaattagaaactaggaagagggcggagaacttgtgcagggaagcaatttggattaccttaaaaatttttttttgtctgggcgcggtggctcatgcctgttatcccagcactttgggaggccgaggcaggtggatcacaaggtcaggagatcgagaccatcctggctaacacggtgaaaccccgtctctactaaaaatacaaaaaaattagatgggcatggtggcgggcacctgtagtcccagctactcgggaggctgaggcaggagaatggcgtgaacctgggaggtggagcttgcagtgagcctagatggcgctactgcactccagcctgggcgagagtgaaagactccgtctcaaaaaaaaaaaaaaatttttttttgagaccgagtcttgctctgttgcccaggctggagtgcagtggtgccatgttggctcactgcaacctccatctcccaggctcaagtgatcctcctgcctcagcctctccggtagctgggactacaagcgcatgccaccacggccagctaattttcgtactttttgtagagatggggtttcgccatgttgcctaggatggtttcgaacacgtgggctcaaggaagccacctgccttggcctcccaaagtgctgggattacaggcacaaactccagtgcccggcctaccattttgtttttaatgtttgtgatacacggtgtacttaccatagccaggcgctacgctgagcttttcacgtgtgacacctcactgaatcccccaaccatcctagtcagcatgtattattattcccattttagagacgaggaaactggcattcaaagagcttagatacttgctggagatccacacctcgaaagtgtagaaccaggtttttctgatgccagaagctgtttctaaatgctctgctgaactagctctgcaggaacagaatttggacaaggagatacaggagcaaggggatggggcattttaggttcttagaaagtgagtggatgcgtgttgggaagccagtacctggaggctgtgtctgtgcacggaatttacagcctctccaaaccccttcccaggaactggatccgccagtacccagccttggtgaactgcacaaccatcaactggttctcagagtggccccaagaggccctgctcgaggtggctgagaagtgcctcataggagtagacctgggaactcaggagaatgtgagcccctcctccccacctctcattgcatccctggcctccctctcccccgcctctcatctctcatcgcacccccggcctctctccttcccgcctctcatcgcactcccagcctctctcccacttccgtttccatctgccttttcatcctgtgtcactggcctcagatccacaggaaggtggcccagatctttgtcactatgcactggtcagtagctcagtattcccagaagatgctgttggaactgcggagacacaactatgtcacacccaccaaatacctggaactcctgtctggatataagaagtatgaaggggggcaggggatgtgcagggccagggaggctggtgtcttctgagggcgatgggtgaaatgatgctgatgtgcaagggcagagacacaaaggccacagttctgcccaggaagttgggaagagggagttggggcttcccgtgggaggggctgtctccagagccttctggctatgtccccctcagccgctctccacaccctcttggcccttattttctggcatgaagtttctctgtctttttctgaccataatataactggaacattgccataatatacccagtcctttcctgtctgcctttaatgtcttctagactttctacctgtatgagatagaaaaagcaaagtgttttccctactctctcactcaacacagtacagtccctcagcatccgtgggggattggttccaggacctcccacggataccaaaatccacagatgctccagtccctgatatagaatggagtatctgcatgtaacttatgcacgttcctcccatatactttgaatcctctctagatgagttataatacctaatacaatgtaaatgctatgtaaatagttgttatactgtattgtttagggaataatgacaagaagaaaaagtctgtacatgttcagtgcagatgcaaatttttttgcaatttttttttttttagacggagtctcgctctgttgcccaggctggagtgcagtggcgcagtcttggctcactgcaacctctgcctcccgggttcaagtgactctcctgcctcagcctacctagtagctgggattacaggcacgcgccaccatgcccagctatttttttttttttttgtatttttagtagagacagggtttcaccatgttggccaggctgttcttgaactcctgacctcaggtgatcctccggccttggcctcccaaagtgctgggattacaggcatgagccaccgtgcccagacttttttcaaatatttttgatcctctgttggttgaatccacggatgtggatacggaaggctggctgtacttcacttctgacaccagatgtggtggggattttccccacccaagcagttctccaggggacactggctgggtgtcctatgatataactcaagtctgaaatggtctacctggagttagagtcagatcgcacaggtggagggctcagtcccacaatacacccgccgcttctgatgctaaccgaaagcccagtgttttacctgtgtttctgcctggccggttataaatcaagggttcccaccacccccttgtcaggttcagttaatttgctagagtggctcacagaactcaggaaacacttcacctactattgctgatttattgcaaaggatattttaaaagatacaaataaggctgggcacggtgactcacgcctgtaatcccagcactttgggaggccaaggtgggccgatcacttgaggtcaggagttcaagaacagcctggccaacatggtgaaaccctgtctctacaaaaatacaaaaattagccaggcatgatggcgggtgcctgtaatgccagctactggggaggctgaggcgggagaatcatttgaacccgggaggtggaggttgcagtgagctgagattgcatcattgcactccagcctgggtgacagatcgagactccgtctcaaaaaaaaaaatcagaaattgtggggcaggtgcagtggctcatgcctgtaatcccagcacgttgggaggctgaggtgggaggatcacttgaggtcaggagtttgagaccagcctgggcaaaataacaagacgccatctctacaaaaaaagaaagagagagagagagcaataaattgttgcaatactgggcccacattcattcccatagggaaaaaaaaccaggctggagctgagggacggctgcctgccctgggccagcccacctgcctgttccacagtgggaaacagaggaagattctcatgtaggggaggtggtgtgatggagactgtttaacaagctgattctggtagtggtgtgtagaacaaaccagaggaatgagagcctgaaatcaagaagagcccttgggaagctgttggcaatgacccaggcaggaagtgatagaatcccgaccaggatggtgggggtagtgttggtggcaacagaaaggaaggcggactcgagacacacggggaaggtggaccttacaggacaccgcgctttccggaagccccgcctctccacaccctgtcctattctttcccccaggttgctgggagaaaaacggcaggagctgctggcccaagccaataaactgcggacaggcttgttcaagatcgacgaaactagggaaaaggtgcaagtgatgtcgttggagctggaggatgccaagaagaaggtggctgagttccagaagcagtgtgaggagtacctggtcatcattgtgcagcagaagcgggaggcagatgagcagcagaaggtccagggcccacgcccaccccccgtgccccactcccaccagtgccggctactgcgtcagggaacccatgttccccccttcttaaattttctttagtgactgggtgcagtggctcacgcctgtaatcccagcactttgggaggctgaggcaggaggatcacctgaggtcaggagttcgagaccaacttggccaacatggtgaaaccctgtctctactaaaaatacaaagattagctgggcgtggtggcgggtgcctgtaatcccagctactcgggaggctgaggcaggagaatcgcttaaaccctgggggcggaggttgcagtgaactgagattgcaccactgcactccagcctgggcgaaagagctagactccatctcaaaaaaaaaaaaaaattctttagctttctctttcatcttttccaccaacaccgtcactcccacctttgcccaaggcaaagacaaaaaacccttgtccttttttcatccctaggccgtaacagccaacagtgaaaagattgcagttgaggaaatcaagtgtcaggcactggctgacaatgcccagaaagatctagaagaggcactgcccgccctggaagaggccatgcgggtaccaggggcgggtgcaaggatgggagccaggaacgcgaggccccggggaagggaatgggccagtcttctttgtcctcaaagactctggggaagtgggaagaagaggtggcacctcagctaggttctgtctccagaaggtcctgtcttaccctcactttatccccttttcccccaggccctggagtctctgaacaagaaggatataggagagatcaagtcttatggacggcccccagcccaagtggagatagtgatgcaggcagttatgattcttcgaggcaacgagcccacatgggcagaggccaagaggcagctaggtaagctagagacaatgaaatcaatgacttccactcacccagtgtttattgatcgtcggctgtgcagcagacactcagaaagatagggatggatgaggcattgttcttaccctcaagagcacagggcctagtagaaaggagaccgcatgaatatcagttaaggttctttggttgtgggtcgagtgtggtggttcatgcctgtaaacccaagctttgggagggcaaggtgggcagatcacttgagcccaggagtttgagaccagcctgggcaacatgacgaaaacccatctctacaaaaaaaaatgcaaaaattagctgggcatgatggtgcatgcctgtagtcccagctacttgggaggctgaggcaggaggatcgtttaaacctggaaggctgaggctgcagtgagccgagattgcgccattgcactccagcctgggagacagagccagaccctgtctccaaagaaaaaaaaagattatttagttgttactggtattttctgactttttacaaagttacctatttcttttcactaaaaagagaaaaagaaaaaactacatttctgattgcttttataattattaaatatgaaatttttaaaaagattatttggttgtaagtaacagaaaacagctcatcttaatactgacattcagcttacaatggtttgacttaagatttttcgtctttacaatggtacccatacaatcattctgtttttcactttcagtacagtgttcaatacattacatgagatattcaacactttgttataaaatagactttgtgttagatgattttgcccaactgtaggcttaatgtaagtgctctgagcacgtctaagttaggctgggatgaattatgacattcagtaggttagatgcattaaatgcatttttgatttaccatattttcaatgtatgatgggcttatcgggagcatctgtatattaaccaaaattgtcctaaagatagaagaatgggccaggcacggtggctcacgcctgtaatcccagcactttgggaggctgaggcaggtggatcacgaggtcaggagatcgagaccatcctggctaacacggtgaaaccctgtctctactacaaaatacaaaaaaattagccgggtgtggtggcaggcacctgtagtcccagctactcgggaggctgaggcaggagaatggtgtgaatctgggaggcggagcttgcagtgagccgagattgcacctctgcactccagcctgggcaacagagcgacactccatctcaaaaaaaaaaaaaaaaaaaaaaaagatagaagaatgtattgctgcatccaagggcaggaatgccctcaggcccccagaggggaacaagaatcagaaaatgggaaccgggactctgtgttccattcttgtggtttactctgctctgggttcccatagtagaatacagcctgccagtctcggtttggtgatccctgccctagaagaaagtgcaaagcagagagaaaaaaagtgaagtgtagggtggcttggctgagtgttcaaggtaagtgatgagagaggagctgggaagattgtcgaggaccttggggactgagaggtgcccagagacagagtcaagtcagagggaggaactaggggccaggtcagataatttggccttaggaactgagcccaggaaaaatgtggctatgcgtgagtagtggaggtgaaactgctggacaaggaggatggcattaagcctctggctaaggcccctaattttcatcccacaggggaacagaacttcatcaagtcactgatcaactttgataaagacaatatctcagataaggttctgaagaagattggggcctactgcgcccagcctgacttccagcctgatatcatcggccgcgtctccctggctgccaagtccctctgcatgtgggtgcgggccatggaggtaaaggcgtcagggctggggcggggcggtagggagggcaggcctgggggagtgcggatgcacagacccaggtggaaggaggggatgcctggaggtgagggggttggtgggttggtgggcgactcccacagcctgactgtctccccacagctgtatgggcggctatatcgggtggtggagcccaagcgaatccgaatgaacgctgccttggctcagcttcgggagaagcaagccgcgctcgctgaggcccaggagaagctgcgggaggtgagctgatcgcctgtcctttccacggaggtccctctccctgagttctggattgcttcattaagcatttgttttcccccatctaattctagcccccttccccatgtcctgtgccattccagtcctgtctccttcccactctgtgccctgtttagactgggctgcctctggctcagaaagctaagtcaattgcagagggttataaaggctcaaaggcactgcgacccaggagcccttccaaagattgacttgggagctggcaatctctgtcacacccttcggagatggcgcctgagatattaactgatgacatctgcgtggcaaattggtctttgccagagggatgggtcaagagtgtctgtgtcgcttctgtggaccaagaacaacgtgagggtgtctgtgcatatgttgtgtggggacgggctctcccagaggccaagtgggttagttaccgtgaggagtctgggcaacccaggcgatctcctgcaagatgcatgcatgaggctgggcgccacggctcatgcctgtaatcccagcactttgggaggccgaggtaggtggaccacctgaggtcatgagttcaagactagcctggccaacatggtgaaaccctatctctactaaaaatacaaaaattagccgggcatggtggcaggcacctgtaatcccagctactcaggaggctgaggcatgagaatcgcttgaacccaggaggtggaggttgcagtgagccaagttcacaccactgcaatgcagcctggcgacagagtgagactgtctcagaaaaaaaaaaaaaaaagatgcatgcataagtgactcctgaaccaggcagaatgatgggcaagtgccattatcaaaaaaattcaaaattcttccagtttatcatttgattttttaaatgattgatttaataggtgatactactctgtccccaaggtaatacagttacatggtttgaagtgtgaaaggtacaaaggagtatccaataagaagtttcccctcgcccaccttctgttctctagtcaccagctttcctctctgaaagcagccgatattactgtcacccaggctggagtgcagtggcgcaatctcagctcactgcaacctccacctcctgggttcaagagattctcctgcctcagcctcctgagtagctgggactacaggtgcccgccaccacgcccggctgatttttgtatttttagtagagacggggttttgccatgttggccaggctggtctcaaactcctgacctcaggtgatctgccagcctcagcctctcaaagtgctgggattacaggcatgagccactgcccccagcctgcaccttactatcttatttacctgtgagttgaagattgttccttatcagtatgtaaagagcctctgctttctttttaccactgcatgatattccagtgggtagctacagggacaccatcatttatttaactgttccccatttgagggagacactgtttccaatctttggatctttgcttgccctgtaactttgttggtgctatcttcatatagaaatttaaaatatttatataattgaagctggccatacaatttcaaactgttttacctaaaaccaactttggaaaacatccaggttcgacctccacagatcagatgaggagcctgaggctagggagatcaagggctcactggctcgtcaccgtcagagctgggctagatcctgtgtttcctgacttcacgcctctctgcccacagctcatccccgtttttttcctgctgtaggcatctttactgtcaaaagctaagctgcccacgaggcctcttctgtgcagggaactcacccaggttgggtgaacggggcttctctctgcacctctgcacctgctcctccacggctccgtccctgctaccaccgccacctcccaacctctcacaaaactttgctcttttactctgtcttttcccaagagcgaagaatcacaggtgtggcaatctgtttggaaagggttttcacctagatgaatcatatcctgggctaaataattaggagtggttcctcatatgtgaaaaatgggacctctggggtgcactgccaacaacatcattcatcaaacaagcatttatagtgcacccagtgttaggtattttggtggagggtccacacccacacttgagaacccctaagtgaaaagagaaagcagacagggaacaaacatttctccttttttacggacaaagcctgtgacgtttatgagccaaatgcaccttaaaaaaaaaaaaaaagcagcagcagcatttatgtgtttatttttagagatggggtcttgctgtgttgcccaggctggtcttggtcttgaattcccatctcagtcttacaagttgttgggattacaggtgtgagccaccgtgccccgaaatgtaccttcctttccttccttccctccctcccttccttccttccttccttttcttctttcttttctttcttttttttcttttttttttttttgagacaggatctcactctgtcgcccagactggaatgcagtggcgcaatcacgactcactgcagccttgacttcctgggctctggtgatcctcccacccaagcctcctgagtagctgggcctacaggcacactccactattcctggctaattttttatattttttgtagagacggggtttcaccatgttgcccagtctggtcttgaactcgtgggctcaagtgatcctcctgccttggcctcccaagttgctaggattacaagggtgagccaccccacctggcccaaatataccctttttgttttgttttgtttcgttttgtttttgagagagagtctcgctctatcacccaggctggagcacggtggtgcgatcccagctcgctgtaacttctgcctcccagattcaagtgattctcctgcctcagcctcccgagtagctgggattacaggcgtctgccaccacgcccggctaatttttgtatttttagtagagatggggtttcaccacgttggccaggctggtcttgaacttcttacctcaagtgatctgcccgtctcggcctcccaaagtgctgggattacaggtgtgagccaccgcgcctgcccccaaatgtaccttttaatacaacttcacaactaggcactgtgccctgggccctgccaggccaattaagtaagaatccctggcagagcctaagaatcagcattttaaaagctttcctgtcagaacctaccagagatgggaaagcttatgcatggtactgaggctcaggtctgaaaagaggctcagagcccaactacattgcagatcagaacaaattttgagtaaatagctttagccattactcacttgtcagctagttctgatatacaacaagggttacaaaccagtggcgtagatagggccccagaaggctctgaaatgggtcagaacagaatcttaatatactttaaggcgactgtatccccaagtctgaacattcccattttttcccattttgcattccaaattatgtcttaatctactttagggcaactatatccctaaggttgaacattcagatttttttcccattttgcattccaaattatgtctagtcacattgtccaacataacatatcagaggccatttagttcaattaaatgacagcattaaaacgctccaataataacaatatacagaaattccacaaatttgaatataacccctagggagaaattaaatttcaaagattaaataaatccctttgcaaactaaagtccaaagaaatggaaattcgacatcaactaatcttgcctttgtgagttaaaaatctagacttcaaccttctgaagttaaagtccccaagtcatcctccccaacttcctgttctgctccatctcagctgaggggttatctcagttcatttgggctcctataacaaaatactgggtaatttataaataacagaaattgatatcttacagttccgaaggctggaaagtctaaaatcaaggtgcaagtacattcaatgtctggtagggtcagttcctcatggatgacgcttatgtgtgtcttcacataacagaagggacaaacaagctttcttgggcttcttttactagggcactaatcccattcctgagggccctacccccgtgacctaatcacctcccagatgccccacctcccaacaccactccactggagattaagtttgaaaatgaatttgagtgagacatgacatttggaccgtagcagggtgggggttctctgggtagatcagttttcttaacctgggctgtttctccctggaaaaggatgttgttcctcaggacctcagaggctgtattaagttcagaatgaagtctctcgtgagcattatttgagattaaaatagaactcaagggtcttaataaggcatacacaacttgcagataaaattacgttgccaaaaaactggttattaccattgccaaagaccgtagaagaaacccaatagcatttgaggtaatgaggatacacagagaaaatcttggttttagctttaccaaaatgtcagttatctggaaccatgacttgtgcacttaaatttaactaggagaaatctttagcaatagattaatataagagatacaatctaaccaataagcatttactggatcgggggttataaatccacacatatgtatacattcttttcttagggggttgatcgtggtaaaatacatataaaatatatcattataaccattttgaagtgcaccattcaggctgggcttggtggctcatgcctgtgatcctagctctttgggaggcaggggccgggggattgcttgagcctagaagttggagatcagcctgggcaacatagagagactttgtgtccacaaaatataaaaaaatcagccagacacagtggcgcacacctgtagttccagctacttggaaggctgaggtgggaggatcacttgagcccagaaggttgagggtgcagtgagctatgattatgccactgtcctccagcctgggcaacagagcaaaatcctgcctcaaaaaataaagataaaaataaagccaggtgcggtggctcacgcctggaatcccagcactctgggaggccgaggtgtgcggatcacccaaggtcaggagtttgagaccagcctggccaacatggtgaaaccctgtctctactaaaaataccaaaaaaaaaaaaaaaaaaaaaaaaaaaaagctgggcgtggtggtgggcacctgtaatcctagctactagggaggctgaggcaggagaatcacttgaacccgggaggcggggtttgcagtgagctgagaagctgagactgaatgattgcactccagcctgagtgacaagagtgagactctgtgtcaaaaaaaaaaaaagcctaaaatggatacaccaggcaacagcagtaagactacttgtatatgtatagaatacctctggaaggagagtcaaggaacaggtaacactggctgcctctaaagaaggaacctggctgagtggggaacagggttaggaggaagatctttcatatcctcatgcccttaggccttttgaatttttgatagctattaaaaaattcacaaagtaaaatttaaaggaacgagaaatagcagtgtgaagacgtgcttatgcctgtatacgaatttctctttttttcttttgtaggtttttttttttggtggggggcatagagacagggtcttgctgtgctgctacggtctcaaacttctggcctcaagcaatcctcccgcctctgcctcccagagtgctgggattacaggtgtgagccaccatgcctggccttgtacaaggatatttattacagcgttgttaatagcagaatgttggaaaaacacaaatgtgtatccgtaggagacttgttacataaatcatagttcagtctcacataagagtattttgcagctactaaaaagaatgaggcagctcacaagaactgatttggaaacaagtaaaaaaaatagtgaagtacaaacagtattatagcatataaccactgattaaaaattcatttattctggccaggcccagtggctcatgcctgtaattccagcactttgggaggttgacgcgggtggatgactggaggtcaggagttcgagaccagcctggccaacatgttgaaacactgtctctactagaaatacaaaaattagccaggcatggtggtgcacacctgtaatcccagctactcggaaggctgaggcaggagaatcgcttgaacccaggaggtggaggttgcagtgagccaagatggcgccactgcactccagcctgggcgacagtgtgagactctgtctcaaaaaaaaaaaaaaaaattatttattcaaaaaaatatgtgagtgctgggcattattttaggtctaaggattcagtggtgaacaagtctctgacttcactgtgcttatattttctttatatataaatgattctgtgcatggactattctagaaagctacacgggaaactagggcagggcctgggaccaggctcaggaatggcaggaagacttccccttaaccgggtgcactttcgttccttttggattttgatttatgtaaatatattcactattctccaaaaaaaaaaaaaaaaaaacagatagtaaaaattattttctaagatatgacaaagattttattaggtgtaataatagtgttgtggttatgcagaaaaatgtcattattattacttttaaagatatgttataaagtatttaggcttgaggatttcatgagtttttaatttacttaaagatattttggcaaaaaacaagtagatgaaatatatatagcaaaatgttaactgtgaaatctagctgatgggtgtttctaggtttaagttttcataataatttttaaaaatttaaagctccaacgagattagcatactttaaaaatagaggcatacgcataatttttcagagatacagaagtaacaaccagcataaataaaaagaaaagtggttaaaaagtagtttgccatggttgggcgtggtggctcacgcctgtaatcccagcgctttgggaggctgaggctggaggatcacctgaggtcaggagtttgagatcagcctctactaaaaacacaaaaattggccgggtgtggtggtgcatgcctgtaattccagctactcgggaggctgaggcaggagaatcgcttgaacccaggaggcagaggttgcggtgaggtgagatgtgccattgcactccagcctgggagacaagagcgagactccgtctcaaaacaaacaaacaaacaaagtagtttgcctcagaggaagaagtctggctgtgggaaaggtggtctagatgctacttttcctgtaacctcttttatatcatttaggttttaacctcgtgcatgtatgtctttctttctttttgagacaaaaaaaaagaaaaagaaaaaagattggccatgctggtctggaactcctgacctggtgatctgcctgccttggcttcccaaagtgctgggattacagggtgagccaccgcacctggccctccatgttgttttaaagaatatcttctggagagtgatctctcccatttccaagtgcttgggtcaggtagtgcttgcttgctgtgtgccttgcaccgtgccatagcccacatcacccttacctgcagccaccttggcgaggctccgaaaggatgaaacttaccagaattactcagttaaggcagagctacttctactttctagtagtggaactatttccacgatgtgggctgcctttcccagtgaggtggcagcgggaaagggaacatgtatcgtgtaaatgctatgtgtaatcccccaccccatattcctcatgatgaaaaggacggtgatacagtctgtaaccaggcacaactgctgttgggtggtcagatatacatacaggatcacacacacatatacaggatcacacacacatatacaggatcacacacatatacaggatcatacacacatatacaggatcacacacacatatacaggatcacatacacatacaggatcacacacacatatacgggatcacacacacgtatacgggatcacacacatatacgggatcacacacacatatatgggatcacacacatgtatacgggatcacacacacgtatacgggatcacacacacatatacaggatcacacacacatatacaggatcttgggacaaggctctatcagttctctccttcagatttcagtgaatatatatatattcattccaacctccacagagtccacaggtggcaatgacttgagaggggtttctctagtatacacagctctgcccaggcctccatctctagtgtgggaccttgcacttggtcctttgtctttttatttttattcttattttctactttttgaatagaggcggggtctcaccatgtcgccaggctggtctcaagctcctggcctcaagtgatccttctgccttggcttgccaaagtattgggattacaggcatgagccaccacgcccagccagctctttgtctcgaatggactctccctctaacagctcttgggttcatttctttctttttcttcctctttcaaggttccaccttaggtatggcctctggcatggagtggcagtcatttatgtgctgtctggccttcacttgccaccatcttgtgtggcttattatgcttcaagaggtctccgtcccctacccagctaccctgaaactaccaagtagtttctgggctctaggaaagggtggtggaaggaaggggaagaaaattcacctcatctcacgtattttatctcatttactcttcacgataaccctatagggtaggtattcttttacaacatgaggaaactaggctcaaagagattaatttaacaaagctacaaaatggcagctacaaaatggcagagtcatgatgtgaacaagaacaatctggctgcgagccctgtgtttgatgcgctatactcgaatctctcccaggtagctgagaaactggagatgctaaagaaacagtatgatgagaagctggcacagaaggaggagcttcgcaagaagtctgaagagatggagctgaagctggagcgagctgggatgctcgtgtcggggttggctggcgagaaggccagatgggaggagacagtccaggtgagatcagctgtactacctggtgtcctttcactctgctcgccacttccgagagacccatcccttttagcttgaggagcagtcagggaaaacggggacacctgggtatagggaactctaagaactgaggcgtgggagctcttcccctccccctgcacacctttggtgagagcaatggaaggaaaggctttttgcattattagggatctgcttcagtgtttgggcagggctgggaagcacacacaaggactcttgatgtagcccaacaaccagacagaaaacagacacagcacatcttgcttctgcccctcagtgagctcctggcttcacagaaaggttaggccttatcaccagaatgtaaacattgccattagagatagagaactcaaaagtaattagaaccaggctagagttgtcaggacacacaggtttaggggagggaaagatcctctttgaacctgacagtgtccagaagagggtgccttcaaaagcattccaagtgtctcccagagtgctggggcccaggcaggcttaccctccctcctgtccgccagggcctggaggaggacctgggctacctggtgggggactgtctcctggcagctgccttcctgtcctacatgggacccttcctgaccaactaccgggatgagattgtcaaccaaatctggatcgggaaggtgagatgggactcaggcatgacaagtaggctccgagaccagggctgggggcaggacctttgggaatattaagagataccgtgaaggcgcgggggctgctgggctcagctcttcaagttaaagcatggggcttttctctccccagatctgggagcttcaggttccttgctccccttctttcgccatcgataacttcctgtgcaatcctaccaaagtccgggactggaacatccaagggttgccctcagacgccttctccactgagaatggcatcatcgtcacccgaggcaacaggtgagggtgctgctgggcgtgggggcggtacgggagcatgggagagagggcctcacctctgacctgtactccccttccaggtgggcactgatgatcgaccctcaggcccaggccctgaaatggattaagaacatggaaggaggccaggtgtgaggctggggggtcaggttagccccccccttcctgaggccccacctctcccgtagtgttccttcaccttcccccttgctctctagggcctgaagatcatcgacctgcagatgagcgattacctgcgaatcctagaacacgccattcactttggatacccggtgctacttcagaacgtgcaggaatatctggaccccacactgaaccccatgctcaacaaatctgtagcccgaatcggtcaggacaagtccccaagaccagccaagtgggatgctagggagggaagggctggctctctgactgtgtcctcttcttacctgtccctccattcagacagccctggcctggggccttaggacaggctgagtcgctgcccctggatgccggtgggggatgggttagctggtacccatcacatggagtccttgcccctgacccttccgtggatgcaggtggtcggctgttgatgcgcattggcgataaggaggtggaatataataccaatttccgtttctacatcaccaccaagctctccaacccccactacagcccagagacctcagccaagaccaccatcgtcaactttgctgttaaagaacaggtgggtacaggctgaggtccagactgagctagggtgaagcaggaagagtttggaaggattgagaaaagggataagcttgtgttgggcagctgaggatgaggggtctttcaaggtggaaagagatgaggaaggtgaaggtcgaaggagtgacagcccctcactgtgagtcctgatgcccccagggcctggaggcccagctgctgggcattgtggtgcggaaggagcggcctgagctggaggagcagaaggactcactggtcatcaacatcgcggctggtaaaaggaagctcaaggagctggaggatgagatcctgcggtgaggccctgccttcccctcccactgccccacgggtctactcccagccagcctccacccagtctaccccaggcacaacagcatcccagggagcctggtcccgctaaccccttgctccatgtgcctctgggcctccccctaggctgctgaatgaggccaccggctccctgctggatgatgtgcagctggtgaacacgctgcatacctccaagatcacagccacagaggtgactgagcagctggagaccagtgagaccacagagatcaacactgacttggcgcgggaggtaagctcccggccctccagtcctgcctcccaccagccatccaagatgcaactccatcatgacggctcgagacccctccttccctgagcccctgctccctgccacgtccctcagtggccctgactccacccatccccaccggcaggcttaccgcccatgcgcccagcgggcatcaatcctgttcttcgtgctcaatgatatgggctgcatcgaccccatgtaccagttctcactggatgcctacatcagcctctttattctcagcattgacaaaagccaccgcagcaataagctggaggaccgcattgactacctgaatgactaccacacctacgctgtctacaggtctgagggtgcccccaacatgccccagcccggaggccgagtggctgtggttcttctggccactgcaccttcgtgctttcccgcaccgcggctctcagcctgccgctgtccttggcatatgtcctcctggtagctcctcactctcatggcttaaccatcacctgtgggctgatgattccctgtcttgtgtctgtagccctcccttgagcactggacttgtctacacaactgttggagataccagcactgcccagatgttaacgggcaggaagtgcactggcaatcttgtgaaagtaccggttgggattctgcaggtctggggtggggcctgggttctgcaactccaacaagctcccaggggtgccactgctcctggtctgtggatcacatttgagcagcaaggaactggacttctctaccctgacatcccacagacccttcaagctcaactcacttcagatcaaactcattctcttccctcttccttcagggtcctcatccttggatggcaccaacacccacaacccagtcacccaagccagaaattgggagttatcctttattttttataatttttatttgtacagaaagggtctccctatgttgccctggctcgtctcaaactcctgagctcaagggatcctcctgccatggtctcccacagtgttgggattacaggcatgagccaccacgcctggcaaaaactgggagttatccttgactcttccctttcaaagcagtcaccaggttttgttcatgaatatttctgcaactgttccctccccatcttcccactgcttggctgtactttagttctggccctggtgatccttttttctgagttgcacaatggtctcctagaggtccttctgcctctacccactgtccctctcaacccaccctcctgtattgcccacctgaacaaatctgcccatgccgcttcccgggtctgactgccagtggttggttgcttggcccctgtggcccacgaaagccctcaggacctggccttctcctgcctcagcctcacctttcccaccttgcactgggggcctgagcgtccctgactgccctgcatgctgtgcccttctcatgcttttgctcatgctgtgatctctctgcctctcccatgtcacctgaaaactctactgcagcttggggcagctcctcggaaactttccaagtccagcaggcagggacatcataactgatggcctctctgtcctctccgagactgtggcttattcatctttgtgtcttcaggacctagcagagtgcctggcaagacagtaggggaataatgaatgttttgttttttaatggaactgaatgactaattatgagtgaatggctgggcacgttggctcacacctgtaatcccagcactttggaaagctgagacgggtggatcacctgaagtcaggagttcaagaccagactgccaacatggtgaaaccccatctctactaaaaatacaaaaattagccaggcgtggtgatgggctcctgtaatcccagctgcttgggagcctgacgcaggagaatcgcttgaacctgggaggtggaggttgcagtgtgtcgagatcgtaccatggtactccagcctaggtgacaagagcgaaactctgtctcaaaaagtaataataataataagtggactctgggaaattcttgtgtctaggcccctgagtcctcagctgtttccaggaggttaggattagaggctggtgaggtcctctgtgtgaagctgtgtgatagtagcatcatagcattcgcatggagcatcagcccccattccatgctgcccctccctcttccctgtccctttctcccaggtacacctgccgtacccttttcgaacgccacaaactactattcagttttcatatgtgtgccaaaatcttggagacttctggcaagctcaacatggatgaatacaacttctttctacgtgggggtgtggtgagttgggcagagagcacatcccaggatgggatggtcaaggttggggatgagggcaagtgtgacaaggactccagacccagagggtcaggcccacagcatcagtgagtgagctgagaaaatccaggccagcatcaggtgcatggtgagctccctggggctgcggaggtgacttgccatgcacccccttgcactcagcgcaggctgggctttgtggcatgtctcacctgtgacccacaaactggcctgatcttgccgcttttttactgcctttcaaggcactccttccccagcctgagttccatggtcgccctcacaatctctccctcacaggctcctcaaccccagcttttctcctctctctgtcgcatctaccgctctggctagatccagctcctcttcccctctgtccctgcgcggccagtgcactgagcatggccggagaagaacacatccacaccgactggacgcgctttaagtccatgatcgtgaacctcaaggaggcccctaaggcttccagacaaccatgctgcactctcccgccctcctagacattttcttgacttttcccaccttcacttcctgcctcccaccccaaactctcaacacagcaaccagagaggtcccactctgtcactcactgtggctggaccgcagtggcagtgatcttggcttactgcagcctcgacctcccaggctcaagccatcctcgcatcttagcctctggagtagctgggactacaggcctgcgccaccacgcccggctaatttttgtattttttgtagaggcggggtcccaccatgttgcccaggctggtctcgaactcctgggctcaagtgatcctcccacctcagcctcccaaagtgctgggattataggtgtgagccactgtgcccggcctgagaggtccttttaaagtggatgccattgtgacgggctccccatggctggcgccacctcccaccacacagcccccactccactccagccacgcaggcctcattgccctccccaaaccccctggcacgtctcgcctcagggcctttgcgtggccatgccttctgctggaagcctactccccggcgtgtgcacctggccatctctcacctccttcagacctcacctcaatgcgaccttgatcttcttatttaatacttcaaactacccctcaacactctcagtctcccttaccctcctcagagtatcctatttttccttggcactgccgtctttgctatactagataatttacttatttgttatgtttttggttcataatctgcccatgaattcacaatcccatgttagaaaataaaatccccaagggcagatatatttgtccattttgctcagtaatgcatcccaatgattaaaatgcatagttggcgaacaataaatatttgttaagaagaatgaataagcaagtgagtgaatgaatgagtaaatagtttgtgcttctgtgaaggtgaggctaccaaccagtcattaggttggagacattattaccaggcaaccagcagagggcgccagcttcctaaatttgaactgtgagggctaagggcagggtctgagtcctagcccccacgtttattccccaggatccctgtattcatctcttcactctcatacaaaagccattttgggctgggcgcggtggctgacacctgtaatcccagtactttgggaggccgaggaggatgatcacctgagatcaggagttcgagaccagcctggccaacatggtgaaaccccgtgtctactaaaaatacaataattagccaggtgtggtggcgagcacctgtaatctcagctactcaggaggctgaggcaggagaatcgcttgaacctgggggtcagaggttgcagtgagccgagattgtgccattgcactctggcctaggtgacaagaataagactccatctcaaaaaaaaaaaaaaaattccatttggttttcccaccgagagagagaaaaatacagagagagagagagagagagagaggagaaaaagatcactcttcttttgaagtattcccaagtcaatccctttcttcctccccttctcccaccaggtcttggatcgggagggccaaatggacaatccatgtagtagctggcttgcagatgcctactgggataacatcacagagctagacaaactgaccaacttccacggactcatgaactcctttgagcagtaccctcgtgactggcacctgtggtataccaatgctgccccggagaaggcgatgctgccaggtaccaggcgtctgtgtcccactctcacttttctccttccctccattcagccacatgccggcccttcccattgtcctccatcccctctcccagctggtgcctgcctcctggcccggagcacattcccggcaggtgcccctttgtctggattccccgctcttccagactcactccctctccctgcaatgactcacctcatccccaggtgagtgggaaaatgcctgcaatgaaatgcaacggatgctgatcgttcgctccctgcgccaggaccgcgtggccttctgcgtgacctccttcatcatcaccaaccttggctcccgcttcatcgagccgcctgtgctgaatatgaagtcggtcggtggctcggcttccttgtccccacggcccatgggtctttcctgcctccctcgctctgtttcagtctccttcatctctctctcccactttggtcatgtggccttctgcctgatgctatacctgtgcttctggcaggtgctggaggattcaaccccacgatccccactcgtgttcatcctgtcccctggtgtggaccccaccagtgccctgctgcagctggcagagcacatgggcatggcccagcgcttccacgccctgtccctgggccagggccaggcccccatcgctgctcggctcctccgagagggtgtgactcagggttggtgtccatcctttcttccacccccatcttcagcccagtccttgtccctagaacctccaacctcaattacactactgtccctgtacctcccacttctacagagggccccagaagtggcagatcttagtgttaggcccccccagcacccccaccccaacaccaggtggaaagcatgaggacaggcagggcttaggaaatgattcccactgaccctggcatctccttgcaggacactgggtgttcctggcaaactgccacctgtcactgtcttggatgcctaatctggacaagctggtggagcagctgcaggtggaggatcctcatccatccttccgcctctggctcagctccatcccccacccagacttccctatctcaatcttgcaggtcagcatcaagatgaccacagagccaccaaaggtatgtggccatagagaaccagcatcatcagggccatctggtccaccttacctcctgctagcaccagagagagggcttaaccaacaacaacatgatttgattgtcctcaaaaaattccacctcattcctctcctgtttgtgccaaactcctagaacacaataataagagctaacatttcttgagtgattatcatgtgccacgcactgttctaagttctttacatttattaactcgtttaatatgggtgtgtgcacacacacaccctataaggtgaatactgttacccccattttaaagataggaaatgagatacagaaagagtaaataagtattccagagccagagtttgggtagttgggtccccaaattcattcttttatacctcagaaccttcctgcctcccatcatttccttacatcctcttccgaatgtcacacttcctgcctctttgcctttcctttcctccgactctactgaaatttttatctccaatatcacaagctcatcaccaaatgcaatcatcaccaccctctaaaatctgccgtgtcactgcgcttcacccactcacccctgcttaaactattttagtagcttttcattgcgcttagttgagatcaaaatcctttttgctcaccctgtgaaaagcacatggaccagtatgtatcatcctcaacagataagagctgtttgaatcacgcatgggtgcctttcatcattattaatcctccttggccacttggggcagctgtcacagtcgactgtccctttccctggctccctgacacatcactcctgctttccccgctgtcttttgacatatcatttattacttcggtgtttctttttcctctgcctgtgaccagattgcaatacttactccttaacctaaggactaagaggggagggccaaagaggggagggacccttggtcctggcccagcgtttctcattctactttctcctttcacaagttgttggagaaattgtccttttcatgatttcaactctaatcccatctctggcatcagccccaaagtcagtgccagctctgaattgccatcagattacaaagcacttcttggcacaccagcaccataatagcaactcgtttcacacttttttgtcccaacccccaagactcagaatgtgattacgtttagaggcaggatatttttttagaaagcgtcttggccaggcatggtggctcaggccgggtgtgatggctcacacctgtaatcctagcatttggggaggctgaagcaggtggatcacctgagctcaggaaggttagatatggagttcaggtatgataaccctggctagaggtggaggttgcagggagctgagattgcgctgttacactgcagcctgggctccgcctcccaggttcaagcagttctcctacctcagccacctgagtagctgggactacaggtgtgcgccactacgccctactaatttttgcatttttagtagagacagggtttcaccatggtggccaggctggtctcgaactcctgacctcaggtgatccacccaccttggcttcccaaagtgctgggattacagggattacaggtgtgagccaccgtgcccagcctgagttttacttcaaataagaaagtccctgtattcacagcccccagttgccagtttgggatatagtcctggagtatattcctgggtcacttcctgctatccagtcttttaaaaaagctagatattaagtaggtacaaaagaagatttataaaatatatgcaagttataaaggatcatgattccttgaatatctgtgtgcccatcatcttttttttttttttttttttttgagatggagcctcactctgtcgcccaggctggagcgcagtggcgccatctcggctcactgaaacatccgcctcccagattcaagcgattctcctgcctcagcctccgagtagctgggattacaggtgcccgccaccacacctggctaatttttgtatttttagtagagatggagtttcaccatgttggccaggctggtcttgaactcctgacctcaggcaatctgcctactctcggcctcccaaagtgctgggattacaggcatgagtcaccgcacccggcccatcatccttttaagaaagaaaaatcccagcattttctttgaagtcccagtgtgcctcttcccaatctcatcactttccctccccactcagaggaaaccactcttctgaatcttgtatttgtcattttctttataatgtttttcttttcctctggagttagggattctttttcattgtaatgcaaaagtttgtattgctaatgcaaccattgctatatatgtttctctgcaacttgcttttttcattcaacattatgtgcttgacattcattcatgatgttcttcgcgttttgtagttcttcatatattccagatcctaatcctttgtcagttatgtgttttgtggtttgtctcttctcttttatgctgttttttggtgaagagaaattcttaatttttatgaggttgaatttagctatctttccttttttaaatggtttgtgctcctttgtcttgttcaagaaatccttgcttaaagattgtaaaagtactctcctatacttgccttccaaaaaatttataatttgactttcacatttaagtttttaatcacttggaattcatttttgtgactgtggtatgaggtagaggtccaattttctttggttttgttttgctttttttgagacagagtcttgctctgtcacccaggctagagtgcagtggcgtgatctcggctcactgcaacctctgcctcccaggttcaagcgattctcctgcctcagtctcctgagtagctgagattacaggcacctgccaccctacccagctaattttgttattttttgtagagacggggtttcaccatgttgaccaggctggtctcgaacttctgacctcaggtgatccacccgcctcagccttccaaactgttgggattacacgcatcagccactgcgcccagccaattttttttttctacatggataaccaattctcccagtaccacttctcaaatactgcgaaagtacttttctgatctgtagtgcctgctcagccttcaatcatgtttccatatatgtatgggtttcagggtcctttattctgttcattggtcaaattgttttatcctggaatcaatactttagtctttgtttgtttgtttgtttgtttgggatggagtctcactctgtggcccagactggagtgcactggcaccatcttggctcactgcaacctctgcctcccaggctctagcaatctttccacctgcacctcacaggtgtgtgccaccactctggctaatttttgtgtttttttgtagagactggatttcaccatgttggccaggctggtcttggactcctggacttaagctgtcctcccacttcagcctcccaaactgctgggattacaggtgtaacccacagtgccatgctgatatactttagtcttaattaccatatagctttataataattcttgatggctggtaaggcacatcttcttaccttattcttcttcaggctattcttgaccttttattcttcaatataaattttagaatttgtttgttctattaaaaaaattctattcatcagtttggggaaaattcacatccttagaacaatgaaactcctaatctttaagtatatttctccatttattcattttttcctctttttttagacagagagggtcttgctctatagcccaggtggagtgcagtggtacaatcatagcacaatgggattgcgggtggcatgagccactgttcccagcctccatttattatttattttaataaaattctgtaatgttctttttttattttttattttttaaatagagacagagtcttgttacgttgcctgggttggtctcaaactcctaggctcaagtgatcctcccatcttggcctcccaaagtgctgagattacaggtgtgagccactatgcctggcctaaaattctgtaattttctccgtaaataatcatacattttaattggatttatttcttggtacttgacatatcttgatgtcataagtggcattttttaaaaagtcatgttatttttgttactgctatccagtattcctcaagtttctcactattccattctgtcagtcatagataagtctttttaaaacgctgtttgaacagattgctgtcctactcaagatagagactggctccatgatgcccggtgaatcaagtccaaatggctcaaacatccattattattattatttttttttttttgagacagagtcttgctctgtcacccaggctagagtgcagtggcgctctgcaacctcctcctcctgggttcaagcgattcttctgcctcagcctcccgagtagctgggactacaggtgcgtgtcaccacgcctggctaatttttgtatttttagtagagaggggtttcaccatattggccaggctggtctcaaactcctgacctcctgatctgcccacctcggcctcccaaagtgctgggattacaggcgtgagccagcgcgcctggccacacatccattactcttattgcatctccatctatccacggccctcctcttcccacctgagcacttgcacttgacttcagccaggctcaccctgtcactttattctgtcctcggtgcctttattcaattccttgcatctccaggaaagtaagactctcctctcaagcctagtcatatccttcccatttggaaggcttagttcaaatcccagcttgctcatggagactaataatgccaatcacatagactgttcttccttgatgatatattatggactttttaatctacactaacctttgcacgcaattccgtacatttttgttagttgaacgtatatgtacttatctttgttcatttttctggcaccccaaattgtgctggcctacctaccactgagaacatcagggccgagaggatcaaaagtggtgggatggctgggtgcggtggctcacacctgtaatcccagcactttgggaggccgaggcgggtggattgcttgaggtcacgagtttgagaccagcctggccaacatagtgaaaccctgtctctactaaaaatacaaaaaattagctgggcatggtggtgggcgcctgtaatcacagctacttgggaggctggggcaggagaatcgcttgaatccaggaggcagaggttgcagtgagctgagatcacaccattgcactccagcctgggcaacaacagcgaaactccgtctcaaaaaaaaaaaaaaaaaaaaaaagtggtgggacaagaaggcagggctgccgcaagcccatacaatgcctatctgtgaattagagaaaggcactcagccttgtggaagaatgtagatcttggcatgtagatcaacggctacatttcagcctccactcaccctttcagccagtgcctttgtgcaatgaagaacctccacaactgtacatggcagtgctagtggcaggtctgagtgtgatgcatgtcaccccatctttatatttcattgtccccagggcctaaaggccaacatgacacgtctttaccaactgatgtcagaaccacagttttcccgctgctccaaacctgccaaatataagaagctgctgttttcactctgtttcttccactctgtgttacttgaacgcaaaaagttcctgcagcttggctggaacatcatctatggcttcaatgactccgactttgaggtttgcattagccaggggtcctcatcccagccctctctccttacacgtcctaccccatggctcccctgtgggaatatccgtggacacaaagcctgtgttgaagccccattggcagatttcctgccataactctgggaatgggggcttgggctgggatcatgcctaggtgtcagaaaacttgctgagcctctatctcgatgagtacgaggagacaccttgggacgcacttaagtacctcattgccggcatcaactatggtggacatgtcacagatgactgggaccggcgcctgctgaccacctacatcaatgattatttctgtgaccagtctctatcaactcccttccaccggtgagggggaggtggccctggacagggagccagaggtcacaagtcagccaggtggtgggatcaggggtgggggtaatgtttgaggagaggacgtgagattggaagaagacagagtttgtgggattgagatggggagcagggcagggagctggacaaattggacatgcataggtttggggtcttggcctggcattgagggctgagtccccacaatgtggcagtaattatgctatgactccctaggttgtcagcactggagacttatttcatccccaaggatggcagcctcgcttcttacaaggaatacatcagcttattgcctggcatggacccccctgaggcctttggccagcaccccaatgctgatgtggcctctcagatcactgaggcacaaaccctctttgatactttgctttccttgcaacctcagattacacccaccagggctggaggccagacccgggaagagaaggtaaaaagagccgggcctgggggagggaaagtgatgagaagagggggctacactcaagagctcctgcctgctcaggtccttgagttggccgctgatgtgaagcagaagatccctgaaatgatcgactatgaggggactcaaaaactgctagctctcgacccctcccccctcaatgtggtccttctgcaggagatccagagatacaacacactgatgcagaccatcctgtaagacagagggggactctgcggaacaggggagggtgtgaggagaagcctttgccttctggctagaatgacgttcccaggcccacctcatctctaacactccacctcatcctgctcaggttctcactgacagacctagagaaaggcatccagggtctcatcgtcatgtctacaagcctggaagagattttcaattgcatctttgatgcccatgttcctccgctctggggaaaggcaagattataccattgttgatccttctccaacaatgagctcccctctcaatcctgggccccccaatctcctggttctaggtgggcataaagcaaactgcagagagccgaaactttgaagttagataggttcaaggttaaaacctggctctgccattcattgactgacttcatacaacttattaacttacagactcactcagggaaaattactaacctctccaaggatgtttcagagattcccagtattgtgcctaccactcagtaggtgcttcatcaatgctacctggttaatattactgcggtcattgttatgaatgaatagctgtcgttgtatgcctctttcctagaagttggctttggagagctttgttcacctgtagttggggaacaggggctgccaccacatagtcttctcatatctgcttcaggtgctcaaaataaggatttgggctggacgcggtggctcatgcctgcaatctcagcactttgggaggctgaggcgggcagatcacctgagtttaggagtttgagaccagcctggtcaacatggtgaaaccccgtctctactaaaaaaatacaaaaattagccgggcgtgatggtgggcgcctgtaatcccagctacttgggaggctgaggcaggagaatagcttaacttgggaggtggaggttgcagtgagccaagatcgtaccactgcactccagcctgggggacaagagcaaaactctgtctctaaataaataaataatacggatttgaatgcacggctaaatgagtgaatacacacgcactccttccccaggcatacccctcacaaaagccattggctgcctggacccgggacttggccatgcgtgtggagcagtttgagctgtgggccagccgggcccggcctcctgtgatcttctggttgtctggtttcacctttcccactggcttcctcactgctgtgctgcagtcttcagctcgccaaaacaacgtgagcaatgtgcaaagtgtgagggggggatgtatgctggggccatgtatgtgttctcctcttcagggtcctctcttattctcaccttcaacccccaggtttcagtggacagcctctcctgggagtttatcgtttccactgtggatgacagcaacctagtgtatccccccaaggtgggagccagttgtgcttggggctctgagcaaaagagggtactggaaataattggacgaaaagggaggagagagggagcaggtcaggggcgctggcaattgaagtctagcttctcccagacctgctcccatttctccccaggatggtgtctgggtccggggcctgtacctggaaggtgctggctgggaccggaagaactcctgcttggtggaggcagagcccatgcagcttgtctgcctcatgcccacgatccacttccggcctgcagagagccgcaagaagagcgccaagggtgggacagctccccaggcaggacctgcctgccccgtccctagtttggaacttaacccattctctgctccagcccatcccacacccgctcctgccctgctcctgccctgctctcccggaggctccaggggtctgacttctcctctcctttcccccaggcatgtactcctgcccctgctattactatcccaaccgggcaggcagctcagaccgagcctcctttgtcatcggcattgacctgcggtctggggccatgacacctgatcattggatcaagaggggcactgctctactcatgagcctggacagctgagacctcctcctcttctccgcttgagagagagggtcagggactccaggagctaagacagatgttgcacctaggactgaggccggacctcactcagactttgaccttggccgaatttgtgtgatgtggccctggagatacctagttgtgttagccataaaagtgaaagagttgtattggagctcagtgctgtaaaacacccgcgacaacaagccttaagtctctcaatgcaatggtgagggtctggggagggaggaagcccaggcctcacggaggacagagctactgcggagctgctactggacggggaaagaagcgagggaggtggggcggcctggagcggaacggaggcgtggccctgaacgaatgggcagggcggagccgcctgaagaggctgtggcttaagtctccgggcaggacttcagtgggtggggcggggcttaccttagaagggcgcgtgatccaaatgagtagggatttgtcaggcagggatcagggctgaaccccgtacactgcaccctgaggcccgcaccctgaagcccgcaccccgcacccggcatcctagccggcacccgccctgaggcgagcgggaccggcagaagacggggcggagccggagagggggactagagcgcgaggaggggcgggaccacaagggggcggggctggggagcgggggtgcgggtgtttgtgttggaaaatccaactgcgccactgggcggagcggcccccccagccccggcctgggagaagggggggccgctcgaccccctgggataccttggggagcctgaacacctgggaccccccccagaaccaggtaacggggagccgcgaggacgtctgtaaagagggaaaccctctccttgcagcagggcaggacgcctgagtctctggaggggtagagctggggatggacgtttgggtcttgggaagggcactgggaagaagactggggcggaggtcatgggtcccctagaagagagaacggcggggaaggaggaagaactgggaggcagatgtctcaggttccaaatgtccagaggggcctgaaaggactccccgttccccttgggctgggattccccttcccgactccagggcggggcggggcggggcgcggcggtccttactgaagggcaggactaaagggcagagtttgcagacaggtcaatgccatggcccagtaaggtcagatgtggtcagacttgggtgtgtcccggtcccaggactactttaagtctccctccagttctctgcacgggtgaggtgtagaagcctcagcctgaccttcccaccagcggccccgagagcttcccagcggtagccttcgccttcttcccaccacccccctgcgcctccctttcactccgtctcgccccgctagcctcctcatccctagtccttctcccactccgccgttcccgaaccctagcgcgccccgcacggcttctcggtgcggagccttcccaacgtagccacaagatggcgagggcgagacgcacccagggcaggtgggggatgtgaccgtgaaagtagctgaagccccccgccccggtccgagggaaaggtaggctgaggcccccacttgacttcctgtgatctgggccccctcacaggaaattgtgggcaggaggtcgcagcgcagaagacggggagggggctggggactcaatctccgcctctcccggctggggtaaatagtggggaggggggcacgcggggtggttgctaagcgacgtagattcgcttcctgtttgctgcagcttatgttgtgacactggtgggggttagagacagcggagggcctgaagactgtggggaaggccgagggcaggacgcctggttcccgggacaggaagagccctgggaggaaggcggggaggtagcgagctgcgccgcgaccgaaggggactcggtggttgtccggagggggttagggaccgaggcgcagcgttgacctcggctccccttccctcccctgggttgcttgtcctgttgccagagtaactggagggcgagacttgggagccggattcccgaactctcccgtccgcccaatccgctccagcggtcggccctgacgtcagggccctggcagccaatggggaagggggatgatagcgacaggaaagggagaggggaggggcagcggcggaggctgggaggcagcagctgcctgggacccgcacgtgcactcccacacgctcgcgcccaccccccgccctgcgccgcacgcgcccgagcacccccttgcgcctgcgcggcgagccgggcgcccccctcccctcgtggagtctgtgtaaagccgcctgaggctgcgctcttcagcccctggggacccacacgtctcggtcggtctgcaccgtttcgccggtcgcgaccataatgcccagcctggctcgggagggccgactacctgttccccacctccccccagctggcgccccacactcccaggtgggctgggcggagctgtggtttccggccccatctgctcggccgctgccttcccgggctctggcttaagttgctttcccaagagaaagcgagcgggtaccagcgccccttcccaaggcttctcccgcccgggcccagctgctgttggtggcggaggagggcactgcggggaagccccggacggcccaggtgattcttctgggccatcacgccccttcttcgcgtgaattcctgctctttgatgtgcaccaaaacccttcccattcctaacgtttcctcctcgttcgccccggcgttctttgcacctccctcggctcctttcgggctgtctgtccctgtctccactcgtccttcttcgcttctcccggttatataactcttcctctcgccgtgtcctggtttcaactccacagactccgccctggaacagcgcggggaggggcgggagagttggggacccagacagattccggctggcggccggctggggcacgggggatcctgcagatggaagacggagccccgcgggacccggtgcccccgtccccgcctgccggcccccaccgagatctcgcccaggagagagaaggcacagtatctccgaggggcgtgtcgggccgactcccgtcagaaatgtgggttgggaggtcagggctgcaggcggagaggaggagacaggcaagaggcctgagtccctgggattggagtcgtattaggggtaaaagagataaggacgcctgggtttcttcttatgtctcctttttgggttcccagaattcctaagggtgtttccagtgtttccaggaagcttagccagcacacccactccgccccgtaggggtcaaaggtctgtgttagaggtggcctgggatgatgtcactagtgcacgtgccccgggatggttgccaggcaatgaggcttcctcccccttctattccctcccacctctgccccgagtccagttccagtcccgtgccatctctttcccctctcccttcccgtggtcttagcatcctgcaggtgggaaaccccggcctggagttttgtgagggggaggggcacgggtgtggtgtggctgaaagactttgcccctttgctgggctgagggagccttgggtcacttttccctagattggcacagaagagcttcccctccaaggctccgcccccatagaaaaagctacctagccgtcattttactttcccacctgctgcatggccaagtgtcctattgcccccttccccagattgatttgaagtgggagtggttgaaagacggaagagttgtgtgtagtatgggggggggttcactacacaccagcttatccctgaaatccccataatggcacacccccatctgcaaacaatgaaaggaaaagggtcaagaaacagtattaggctgaaaagtcagggtctttattgtgtgtatgcgggtgaatcggtttgtagcctctcacttggtggagggggactcagttgattgctatggttgttcttctctattaagtcccagggttggtgatggtattggaatgaatcggtttgtgcttttatgtaccttagagcttgggctgtcagatcagacctggattctaattctagctctgtcacttagtggctactaggacttggagaggtcagaacctctctgagcctcgtatgttaatcttgaacatttaaatatcaacacctaccttgaaggccgctgggaggaaaaaaatgagataatttatgcaaatcacttagcacagtgcctggcacagaatgaacacagaatgagtgcttgttgttatgaaatacttttattattaaatggtgttagttactagtttattattattgctgtgggtctgctccaaaccagcggtaaccgtaggagtttgttaaggggtagtggatagtttgtgttaatttggagattggggttagggggctggggattagcttcaactgctttgtgcattttatttgatgaaggctttaggcagatttgtattgctttctttaggattatttttttttctcttggacaagaaatagctaagactattccgtgggccttgaaaataaaataattgtattatggttcttgattttgaagcaagaccccagccccctcccgtgttgatctctggagcctttcgttttgcagagggactccacagtttctctagtggggacagggctaggctgaggggtgtgtaaaaggttggggtgggtgggtggagagagactagtgctgggggctgggggggcgggtagttaaaggaagagaccggaagggaggaggagggagcctgctggtggggagggagggaggggaggaggaggtggaggaggaggaggaggaggagggagggggttggggagagcctgctacagttctttgtttgactccgggactcagggacggggaggaggagggagggaatagaagggggaggaagcccccccccccacacacacacaaacacacacaccccagctgttggacagatgaattacagcctccggcttggggccagggctggtgagggattaaagctctggggctggccctttaaatggctgttagcccctcccccactctgttgtccagacacccctcacacaccctctgaccccctaggcttccccctcactcctcctcttggtctgtcctaaagtctgcccactctgctctcgactagccctttcctagtccctccccccagcacaaccgcagaacacagatgccacagactatagatacacactctctgctcccaggttatgagcctccctgtcctggagagttctagcctgaagctcccttcccgagcagaagggccttgcctgcctgacctctaccacctacagctgaccactaccctggcttaggaaggaggccttggtgggtcacaaatagcacctccctgggggcagtgtcatcagcagccacagaagcttgcggaacattgcatcatggagactgggggctagaggcctgagtctctgaggcaaggggaaggatgggggccggaaggctagggaatatagagattagattgggaccccaagtgtttgggtccataagggcagagaactatgattaagggagcagaaaacataggtccctgaggagcgagtctgaggtgagggccaacttagctctgacccctgatggacacctgattcttggccttggacttatgctaaaagacctagcttcttgtctatgagggttgggaagggagtgggcctgtatcaccttcttaggccacataagaggaaggaggtgatggggaaacaggatattgccttggggttggcagggaggggaggcttgcagtggaggctacttccaggcttaggcccagagtcagagttcttgcaggggaggatggcccctccctgttgggcccgttcatctagtctggctacctgtgctgctagccaagacctgcctgcacccgcctgggggaagaagagggggcagagtccagagggtggggttgactgtctggtgtcttgataaggttggagaggacacagagctgaaggaagagggtctgcatgccctggtgctaggactcaggctggcttgtgtacagatgtcagggcagctggggcgactcaggccagggagtctcagcaggagcgtcctgtcagaagagggatcacgggtttggggtctactgtagacttactcagatgccatatcatggccccttaccaactgatcgagcctgcttcccaaaggggaaggttggatgaccactttggggatggctttttctggttgccatggaaacaagattctcccatcatatctgaccaccagagccaggtttctccttaatgaggggggcagggagcccaggaaaattctccatcctggaagacccccacctctaactgacttttttcttttaggttccccccagggcaacatgccagccccgtagcactgcccaccccacccactgtggtctgttgtaccccactgctggggtggtggttccaatgagacagggcacaccaaactccatctggtaagtcctgtctgagtgaccctctctcctcagcagtctaactctgcaccacatggttggagatgctcggtatgatctggatcatgcccactcttcagaatggtccagtccaattctaagcaccccaccatgtggtgcttgagtggttcagccctcctggtttatggacctcccttctatctcctataaatggttcagccctgtacttcaccagcctctccactactaccaaaaaatcttttccccactatctccctagtgctacaactcagttgcttattgaaatgaagagggagtttgcaagctgaaaagtggatatgagctaccctggaggaattttttcttggtagggaaacagctttgtccctataggagttgttgaacaccctggcttttggagggtgttcagaatttatttggggagatagtggagatcactgccagccacagcagtcttggcatttcacctttccttccagatctctttcagtcccattctctccccactgcactatagcatttgcccccatacctaagtcttactcttctgcttccctctctccttctgtcagttctctgcctgaggccctgctttatttcccattcctttgtaggagaaaagggaagataatccctaagccaggggcttaagttctctctgtgttgttcttcctcattacatatggggtttctcgagtgggactgttttcttctatgtgtctctcactattttgcttgatgttttgcacattggggtgcatggtggatttgtgttgaataatgttaactgaatgagcttcattatgaagaacctatgacttctgagatttgctgcacagcctcctactttatcctctagaggacgtgagacattggggatggtaacatgggtagagctgaaaggaaggttgacccaggagatggcctgtgaggataaaaccaagggagggagagtaggacagaggcagtacataagagtggtaagaatgtggctctggaaagaagcctagctctttcattcttcacttgcagaatgactttggccaagtcacctagcctctctgggcctcaatttcctcatctgtaaaatgggggtaatcagagtacctcctatgtcaggttttggggaggagtaaaagaaatgcttgtaaaatacttaatacagtgcctggcatgtaacaaatattcacaaaatgctagcagttatcaccacagtgggagccacagggagctctgaggataagcagggatgtcgagggatgggacagaacttgattgaaggcagacagacctccaaattcttgactcagacagaatgatcactgatccagcgagacgtcaggatcgagaggagtgtagcaaggagtcaggagggtgggcctgcgccagtgtcgccccgactctgttcagtaacatgaaggcaaacacagaagggcatgtgcggagacacacgtgatcacgctagtgatgcagaggcagacccagacaaaagaccgagacaggagctaggcagacacacagacagagacagccccgcggagtcatgtagacagggataatgacaggaacgcgtcagacacaggcacagagggagacaagatgagcagatatgcaggtgcacgcggagacagacaccgggacccacgcacagccgaccgtgtcagacagactggtgaacacagcgcccagtcagaggcagacacaaggcctgcagtgacacatagcgggccggggccggcaccgtcactcctcggtggggggcggggaggggccggcagccgggggaaggctggggaagggaatcccgggcgggcggcctgcccgggtggctgagtcacagcggagcctcagccggcggccctcccctccgcctccccctcccccaggtaagaagcgagcgtgtaacccctcgcttccaccaggcgtgatgaggacgggcagggagcgggttgcgacgagggtcctggaccgccccacctcggcgcgcgcgcagcatgcccgctgattgccggctaggtaaaaccctatctgcgggctcttgtctctggccgtcacgtgagtttgcgtgcgcacttcaggcctcttaccacgcgtcccgcgcggctgcggcgctgcgcggaggggctcctcggctcaagcccagagagagttaagtgggtgtgattgatggagtgttctctcttggggctccagcgggggcggggggtagggggtcggttaaagtcccgagtccagggcccggatggagggggcggagctgggcttcgccgggagtgcccggatggagagggtgtggcctcggcgggagcggaattaaccctttcagagccgctggctcccgaggttgtgggtcgggtcgggagaggctggaatgtctgcctcagaagtatatcgatctcccagcctggctctggccgcgtgcgtctacctctcgcctgtcttcgaggagtctgtgggtgtcagtctttgtgcctgtccgtggttcccttcccttggttagtatagacaccgggagtcagggagggctattcttgccccagagcgagagtggaggtgagagtggagcgcgagctggcggcgactggggaacaggtgcaagcgccgcgtcggggctgcccggcacggggaggggccatcgtgggggaagacgagaggggaaattccgcgggaccggtggtgagccggtgtgtgggctgaggagttgtgtctgcctctgactgtgtgtctgtgtgtgttcagggaggcgggggctgagtcagtgggaagaggggaaggttttctgggtgactcacgctcccccaccccaagcctgaatcagaccccgagggagggctttgtacggggggcgggggggcgagtgaggagtccagcgcctgggtcccgggtgcggacaaggatccgaggtggctggcgagaatgagtgtgtgtttagtgtacaggaagttttgtcttcaagtgagggctttgtattcttgggtgctggcgtggggctttgtggataaaggtggaagagcagggagctggagggacggcactcactgacttagggaaagctgagtcagttccccgtgggaaaggggaagtggcagaggggaagtgtcatcatcgccgaaggggaagctgcctttcctggtaactggcggcgctctcgggaccacttcccaagcaggcatctgcccctctgttgtctggttccccggctccccctccacgtctggttcttgggtctcctccccgcccctgcctcggtactcgggtgggggcagtcacggagggccatacttgaccacagttcagcgccgtacctggcttggttactgatggaaaggatgctgcctctagtgaggagagagttctgacagtaataccacgtgaaccgcggagagggtccgcggggcccaagcgaccacaagggcttggcggagagtggcacgcagggacctgtagggtccaagcgcttccatgcaaacaaacgaccttgccccttcgggaaggaaggctcttttcaccagaaacccgtctgcccttgtgggctgggtggaaatttccccacagcgcagacttctctcaacgaacgcgaactttccagccacccccagcccctcgtcgcgcactctcccccggcttcctgcccggcgctcgctccagctggagcgctggccccgcccccgcggctttgtactcgacactcgcctctcgctgctctttgtactctagactctcaatggaccgatcccgggagccgagtcggctccctacctgcggggacgccgggtaggcaaggaggaggcgcggggacgcagctcctgggctcagagaggcgagaaggaagagctggggctaaagggaaggtgcccaagagaggggagcgctgtgccagtcgggggtccagtcggcaccaaagcgaaagggtggggggggcgtgaaggaggaagtgaaacgagttctgggttctttaagggagtgggtggtgagagtgggacaagggtgatgtcactgcctgtcgggccccgccctcctccctccctcaggacccccccccccgcagtacatttacacacaccgcttccgctgcgcaagtagccacgtcacgggcaacccccgaaatcccccctcccttggggggcgggggccacgtgggccgtggggaaccgcgtggccccggcggggaagggcagagaggatacgcgagccacgagagaggggccactcgggaccgcggtgcgcgacttctcggaagttgggggactaaaaggggtctgattttgggggtcggtcggtattgaagacccagaaagccaggggaagtagaggacctggaggaactgggtatgagactgggggcttgaccaaggtttgggtcggggtcaggcgttgggggtggagcgccgatagcggcgcggacgggtttgggtgccgtggaagtcgctgtggctggccagccctaagcagttaataggggcgctcggggtagggaggtctgtcactgggcgaggtgaagtgaggaaggggagggacgtcttttttgcgttctgcatccgtctgtcgtccgtcggtcttacggtggccgggcgtggggctactcgagcagcctggccgtggccaccggcggctctgggtgcttgaggcttgcgggtagcgccggcccccacgccggccggagcatgcgactaaccggcctcatccgcatgcgtcttgtcctggctgccttctggccctgacggccggagtgtcggatcctagatggggaccctaggtgggagccgcggggtcacatcggggtcaccccgggctgagctcgtctgaccggctcccgcgcccctcctcccccggccaccgctgccgggctcacctcgctcccattggttccggccaggctgttactgaggcggagacacgggtgatgattggctttctggggagagaggaagtcctgtgattggccagatctctggagcttgccgacgcggtgtgaggacgctcccacggaggccgggtaagcggccgctgcgttttgggtcggcccagtggctccggactggaagcctggcagcgcagccaccccgtccctctgaccggccttttggttccctgccacacacgtcctgactcccagccacactcctgggcctctagggagtggttgggccgggcctccctttggggaaagctaaggccgggccctttgcacaaatgacaaattggtggatgccacagtccgcccatcccagcccctgggccttgactgtgtgctggccagctcgtctcactccttttccttctctctagaattggctgtgaaaggactgaggcagccatctgggggtagcgggcactcttatcagagcggctggagccggaccatcgtcccagagagctggggcagggggccgtgcccaatctccagggctcctggggccactgctgacctggtaagggaaactctggggccgagctggctggatgtacactggcagctctggttttgcctccagtaagagcataatttcttatccccaactcaggctggatgcatcgggcagtggaccctccaggggcccgcgctgcacgggaagcctttgcccttgggggcctgagctgtgctggggcctggagctcctgcccgcctcatccccctcctcgtagcgcatggctgcctggaggcaggtgagaagttggggccctctgtctccaggcacacctctttccatctctgtatccctcaatctgtgtcattctccatgggttcctgtcattctgtgggcttccgtgcatcagccccctcctgcctaggtaggacaagactgctcctttttgccgtatataacagactccttctctctccagatgctcagccagcattgggcagcccccgcttcctgctcccctacccccttcacatggcagtagttctgggcaccccagcaaaccatattatgctccagggtgagtggatatttgaaggttctgggagtgggaggtaaggctggggccttgaaagagtcccctcaagcccaacccccacccacacccccaccccttctgctctgtagggcgcccactccaagacccctccatgggaagctggaatccctgcatggctgtgtgcaggcattgctccgggagccagcccagccagggctttgggaacagcttgggcaactgtacgagtcagagcacgatagtgaggaggccacacgctgctaccacagcgcccttcgatacggaggaagcttcgctgagctggggccccgcattggccgactgcagcaggtaggagaaggcagggcgtgggggacgggattgtacgattgtgccttctggctcagtgccccacctgacatctgcccctgccccgtgtccccccacccccaggcccagctctggaactttcatactggctcctgccagcaccgagccaaggtcctgcccccactggagcaagtgtggaacttgctacaccttgaggtgaggctggcactgggtgggttagggaggagagccaggctgtgcctgcacccgtgccattttctcttctctctttttgttctcagcacaaacggaactatggagccaagcggggaggtcccccggtgaagcgagctgctgaacccccagtggtgcagcctgtgcctcctgcagcactctcaggcccctcaggggaggagggcctcagccctggaggcaagcgaaggagaggctgcaactctgaacaggtgtgggtataggggggccagcaggcagtaagtaggcaggacttgggaatgggattctcacactctcttctctcctagactggccttcccccagggctgccactgcctccaccaccattaccaccaccaccaccaccaccaccaccaccaccaccacccctgcctggcctggctaccagccccccatttcagctaaccaagccagggctgtggagtaccctgcatggagatgcctggggcccagagcgcaagggttcagcacccccagagcgccaggtgagcccctgcctgttgcctttcacctctcacctacaagtcccacgctctctattcctcatcctgcatccctgtttatctcctataggagcagcggcactcgctgcctcacccatatccatacccagctccagcgtacaccgcgcacccccctggccaccggctggtcccggctgctcccccaggcccaggcccccgccccccaggagcagagagccatggctgcctgcctgccacccgtccccccggaagtgaccttagagagagcagagttcagaggtcgcggatggactccagcgtttcaccagcagcaaccaccgcctgcgtgccttacgccccttcccggccccctggcctccccggcaccaccaccagcagcagcagtagcagcagcagcaacactggtctccggggcgtggagccgaacccaggcattgtgagtgacaactgagggtggagggggggatgggtggagcttgtcttgaggcagcccgagcaatgctcctaccacctgcttctacacttgcagcccggcgctgaccattaccaaactcccgcgctggaggtctctcaccatggccgcctggggccctcggcacacagcagtcggaaaccgttcttgggggctcccgctgccactccccacctatccctgccacctggaccttcctcaccccctccacccccctgtccccgcctcttacgccccccaccaccccctgcctggttgaagggtccggcctgccgggcagcccgagaggatggagagatcttagaagagctcttctttgggactgagggacccccccgccctgccccaccacccctcccccatcgcgagggcttcttggggcctccggcctcccgcttttctgtgggcactcaggattctcacacccctcccactcccccaaccccaaccaccagcagtagcaacagcaacagtggcagccacagcagcagccctgctgggcctgtgtcctttcccccaccaccctatctggccagaagtatagacccccttccccggcctcccagcccagcacagaacccccaggacccacctcttgtacccctgactcttgccctgcctccagcccctccttcctcctgccaccaaaatacctcaggaagcttcaggcgcccggagagcccccggcccagggtctccttcccaaagacccccgaggtggggccggggccacccccaggccccctgagtaaagccccccagcctgtgccgcccggggttggggagctgcctgcccgaggccctcgactctttgattttccccccactccgctggaggaccagtttgaggagccagccgaattcaagatcctacctgatgggctggccaacatcatgaagatgctggacgaatccattcgcaaggaagaggaacagcaacaacacgaagcaggcgtggccccccaacccccgctgaaggagccctttgcatctctgcagtctcctttccccaccgacacagcccccaccactactgctcctgctgtcgccgtcaccaccaccaccaccaccaccaccaccaccacggccacccaggaagaggagaagaagccaccaccagccctaccaccaccaccgcctctagccaagttccctccaccctctcagccacagccaccaccacccccaccccccagcccggccagcctgctcaaatccttggcctccgtgctggagggacaaaagtactgttatcgggggactggagcagctgtttccacccggcctgggcccttgcccaccactcagtattcccctggccccccatcaggtgctaccgccctgccgcccacctcagcggcccctagcgcccagggctccccacagccctctgcttcctcgtcatctcagttctctacctcaggcgggccctgggcccgggagcgcagggcgggcgaagagccagtcccgggccccatgacccccacccaaccgcccccacccctatctctgccccctgctcgctctgagtctgaggtgctagaagagatcagccgggcttgcgagacccttgtggagcgggtgggccggagtgccactgacccagccgacccagtggacacagcagagccagcggacagtgggactgagcgactgctgccccccgcacaggccaaggaggaggctggcggggtggcggcagtgtcaggcagctgtaagcggcgacagaaggagcatcagaaggagcatcggcggcacaggcgggcctgtaaggacagtgtgggtcgtcggccccgtgagggcagggcaaaggccaaggccaaggtccccaaagaaaagagccgccgggtgctggggaacctggacctgcagagcgaggagatccagggtcgtgagaagtcccggcccgatcttggcggggcctccaaggccaagccacccacagctccagcccctccatcagctcctgcaccttctgcccagcccacacccccgtcagcctctgtccctggaaagaaggctcgggaggaagccccagggccaccgggtgtcagccgggccgacatgctgaagctgcgctcacttagtgaggggccccccaaggagctgaagatccggctcatcaaggtagagagtggtgacaaggagacctttatcgcctctgaggtggaagagcggcggctgcgcatggcagacctcaccatcagccactgtgctgctgacgtcgtgcgcgccagcaggtgagtcggctgcctgcttgcttgtcccggagacaggctcccttcccccatcaccctgatgtttctgtcttcattccactgtcctcccgcaggaatgccaaggtgaaagggaagtttcgagagtcctacctttcccctgcccagtctgtgaaaccgaagatcaacactgaggagaagctgccccgggaaaaactcaacccccctacacccagcatctatgtatgtgtgccacttggcctcagaaccacccctgccagagggttctaagacagtgttggggactgctggggtgctctgagcctgggccagggctctgaccccagctctcctggtcatgtctcagctggagagcaaacgggatgccttctcacctgtcctgctgcagttctgtacagaccctcgaaatcccatcacagtgatccggggcctggcgggctccctgcggctcagtgagtatggggggcagaaagtgttagggagggctacaagggtctggggcatgtaggaccctctgagaaatcccacacttgaagactcatgacagtggccgtgaggagtccactgagtgatgggtctgctggccttgggctcttctcccatctgtctgtctccagcatttggcaagggagaaggggccatagtcagggcctgattagtcatttctgaattttttggtgattaaggaagagaataatacagattttagaaaacccctgaaaatctgtgatgttggggctctctctcagtcttttattgcgcagaatttcaaacacatacaaaattagagaaagctgtatagaaatacaaaggtcaatcttgtctcctttatacctgtatgttctcccttccccacactgagttatttgaagcacatttcaggctttcacttgactgaatctttaatctttaattggatccaatggtaactcaaagaagctgctgttttgactagactccaaatggggaaaaaagaagctgccattcattgagcacctactatgtgtctgtcaggtgcggtgcacatggccacgcacacatctgggaacactggtctaggggctgagtccttgagcagctgcaggagaaagagggctggtgaggatgcagatagaggccagcactcccagcttcctgtggggctagggctcctgcctatttcttctgggctgagctctgctaaacctatgaccaccctgtcagagccagaggagtaggaagggaaagggtcgattgggtcctcggtccctatcctctgcctctgccccgacaccctgctcggccctcccttccagacttgggcctcttctccaccaagaccctggtggaagcgagtggcgaacacaccgtggaagttcgcacccaggtgcagcagccctcagatgagaactgggatctgacaggcactcggcagatctggccttgtgagagctcccgttcccacaccaccattgccaagtacgcacagtaccaggcctcatccttccaggagtctctgcaggtgagatgagaacgtggccagaggcaggtcctgggacggggctgcggtgggagggctctcgaaaggtctctgacccaggcctgcctaccctctggctgaacaggaggagaaggagagtgaggatgaggagtcagaggagccagacagcaccactggaacccctcctaggtactgtgcaggtgtgccccttctgttcctgcttccttcccctccctctgctctccaccaacctgtgctcttcgccccagcagcagcgcaccagacccgaagaaccatcacatcatcaagtttggcaccaacatcgacttgtctgatgctaagcggtcagtggggctgaggccagggaagttggggcaggagtgctgctaggacctcgtggcgggggcggggtgtagcctctcgtcgcacttccgcaccgcaggtggaagccccagctgcaggagctgctgaagctgcccgccttcatgcgggtaacatccacgggcaacatgctgagccacgtgggccacaccatcctgggcatgaacacggtgcagctgtacatgaaggtgcccggcagccgaacgccaggtgcgctccacgcctgtgcgcgctgatgctggaagcgcgagaggaggggctggcggcggcgctcagccgtcagccaatgagggcagagggcggggctatcggggatcgcagttccgacctggccagccatgccgttctctgtcgacccctgcaggccaccaggagaataacaacttctgctccgtcaacatcaacattggcccaggcgactgcgagtggttcgcggtgcacgagcactactgggagaccatcagcgctttctgtgatcggtgcgtgccgtcctgcgcaagtcagactgccgcgtccccgccctcggtccccagttcccacctgacctgtggccaccccgcaggcacggcgtggactacttgacgggttcctggtggccaatcctggatgatctctatgcatccaatattcctgtgtaccgcttcgtgcagcgacccggagacctcgtgtggattaatgcggggactgtgcactgggtgcaggccaccggctggtgcaacaacattgcctggaacgtggggcccctcaccggtgagagggtggggcaggtgttggcgtggtgtggcgcctcagcggcaagggcctgggaggctggggcttggagagccgccagcagtgagggaaggggcttgggcctaggtgtctgggggctgtttgagagtcctgttgtgatcgcctttggcccgcagcctatcagtaccagctggccctggaacgatacgagtggaatgaggtgaagaacgtcaaatccatcgtgcccatgattcacgtgtcatggaacgtggctcgcacggtcaaaatcagcgaccccgacttgttcaagatgatcaagtgaggaccctatttgggtgggagcccacctccactgactggtcccttttcttgttcttcctgtctgactccaccccatttttacctctctccatccttgtctgcctgtgccccgagtgttactgtgttggggaggctaactaggtccttgctgtcatgaccttttctagtggtccaaatagacaaaagccacaggaaacttcgcctataacagatgcccaggacagaggatgtgacctagacatgaagcggggaggcccctaggggagggccctggggctgcccacccctctgcccttgctccagccctgcctcaggcctcctccttgccggtggtctcaacacaaccccactgctccccaggttctgcctgctgcagtccatgaagcactgccaggtgcaacgcgagagcctggtgcgggcagggaagaaaatcgcttaccagggccgtgtcaaggacgagccagcctactactgcaacgagtgcgatgtgagtgggccggctctgctgctctccctgagtgtccacagtggccctccctccccctgactgcactgtcctccctgccccaggtggaggtgtttaacatcctgttcgtgacaagtgagaatggcagccgcaacacgtacctggtacactgcgagggctgtgcccggcgccgcagcgcaggcctgcagggcgtggtggtgctggagcagtaccgcactgaggagctggctcaggcctacgacgccttcacgctggtgagggcccggcgggcgcgcgggcagcggaggagggcactggggcaggctgcagggacgggcttcgggagcccggccgcgcctttccctgagcccccgccggctttctccccccaggccccagccagcacgtcgcgatgaggccggacgccccgcccgcctgcctgcccgcgcaaggcgccgcggggccaccagcacatgcctgggctggacctaggtcccgcctgtggccgagaagggggtcgggcccagcccttccaccccattggcagctcccctcacttaatttattaagaaaaactttttttttttttttagcaaatatgaggaaaaaaggaaaaaaaatgggagacgggggagggggctggcagcccctcgcccaccagcgcctcccctcaccgactttggcctttttagcaacagacacaaggaccaggctccggcggcggcgggggtcacatacgggttccctcaccctgccagccgcccgcccgcccggcgcagatgcacgcggctcgtgtatgtacatagacgttacggcagccgaggtttttaatgagattctttctatgggctttacccctcccccggaacctccttttttacttccaatgctagctgtgacccctgtacatgtctctttattcacttggttatgatttgtattttttgttcttttcttgtttttttgtttttaatttataacagtcccactcacctctatttattcatttttgggaaaacccgacctcccacacccccaagccatcctgcccgcccctccagggaccgcccgtcgccgggctctccccgcgccccagtgtgtgtccgggcccggcccgaccgtctccacccgtccgcccgcggctccagccgggttctcatggtgctcaaacccgctcccctcccctacgtcctgcactttctcggaccagtccccccactcccgacccgaccccagccccacctgagggtgagcaactcctgtactgtaggggaagaagtgggaactgaaatggtattttgtaaaaaaaataaataaaataaaaaaattaaaggttttaaagaaagaactatgaggaaaaggaaccccgtccttcccagccccggccaactttaaaaaacacagaccttcacccccacccccttttctttttaagtgtgaaacaacccagggccagggcctcactggggcagggacaccccggggtgagtttctctggggctttattttcgttttgttggttgttttttctccacgctggggctgcggaggggtggggggtttacagtcccgcaccctcgcactgcactgtctctctgccccaggggcagaggggtcttcccaaccctacccctattttcggtgatttttgtgtgagaatattaatattaaaaataaacggagaaaaaaaatcctgtttcgctaacggctggtggtagcaggttgagtaccgggagggctgcaagaccgtgattgatggggaggactgcgcagaccctggcgagggtgagcccctccccggaggcgcctgtggaatgtccagggctctggtccgctcctcgggatggggggtgcctaatcctagagccgcattccaggataaggggggtggggagaggctgggccgggggaggggcaggaaagagggctataagggcagcggcccaggcgggcgggatccaggcgggccatggcggatgtccccggggcacagcgagcggttcctggtgacggcccagagccccgggaccccctggactgttgggcctgcgctgttcttgtaacagcccagaatctgctggtggctgccttcaatcttctcctgctggtgctggtgctagggaccatcttgctacccgctgtcaccatgctgggcttcggcttcctctgccactctcaggtgagcgtgcgccccggggtgtgcgtgtgagtgtgagtgttggtgtgtggtgatgctggcggtggggtctatgggccacaacttcaacccgcctgggctgtttccaccccgtgcacagtatcgcctggtcggcttgggcctgacgcctcttctcccacagttcctgcgctcccaggcacccccttgcaccgcgcacctgcgggaccccggtttcacggccctactggtcaccggattcctgctcctcgtgccgctgctcgtgcttgctctggccagctaccgccgcctctgcctgcgcctccgcctagccgattgcctcgtgccctacagccgagccctttatcggcgtcggcgcgccccgcagccgcggcaaatccgggcctcaccagggtcccaggccgttcccacatcaggaaaggtctgggtctaatgaccctcgagtcaagaacaaccctgacggctgccctccctcttattcggcccaaggacttgaagcccggcatcttccgacctgccctgcccccacccctgcctgagcggagtcctagcatccccttgggagcagcagcgtcagtggacccagtgctgagaaaagcccccacatcccggaaaacccactttcctttcacgacccacatctcaatcctgaacatctaggctggaacctgcacacctccccctcagctccgtcgtgaatgggacaacaatctcgtgccctcgttttatggtgcagcttctctagtatttctggggctggggggcggggctggaggggaaggagtgtccacgcatcaataaagatttaacgaactgaacgcgctctgcgaacagaggcgtggcacaagtactatcacccctgccctgtgccgaggaacaggaaacatgtgccagggctacaaatgagcagagaggagcatccttgagccccctggccttatcgcttttgtccgttcttcctggccagacctcagagatctgttcctgaccccaggcacctccccctcaatagagtggaggggcccagcctcggccgcctgccgctgctccccttggggacctgagcccgttctctgaccccagcttagaggaactcggtgttgccaggccggggtgggaaacaatgggccttccggagcaggatgacaccccctcccgccacaattctggagcagcagccgtgggagggaagatgcaggggcccaccctggggcctgttggtccgtcattcagccctgccccccatctctacccctgaacttgagagaacctttggcacccctggacatcttggttgggagaggagggttgagggtgctcccgacttcagatgagccctttcctctagggatggggtgtgctatcctgcaccggcatcccagctacacacagacacaggcccattcggtcataagtttaatgaagtctgaaaggtaagcgccatcgtggtcagagatacggaggcccggtcagactctccctctgcacctcaatggaaacgatgtggtgtccgggtaccatggccaggcccagcacacggggctccccggcagagaaggaatctggaaagaaggatcagagcatcaggaaagtaggccagaatcagtcccgcccctctgagccacgaaaacgagccccagaaaacaagggttgcagccaggcccttaaggggaaatgccttgcgtaaggttccgccacattaccaggcgggtgtgcattccccgggcactgacccgacggcttgaggaactcctgcgccgagcccaggatgacattgcagtcacggtcagtgcagaggaagcagccgaccagtgtccgtccatctgtcatgcgaatgcgcatagtcttgttgagcagcgcctctagctgctgtcgggcgcgctcagccgccgagtcctcgcgctctccgtccgaatcctgcgcggggtgtaacaagcgctcagaccgcgcagcccaggctgcccgcccgcggaaccacagctcccggcagcccgcggggcactcacacaaagcccagaggctgccgggagctgcagttccccaccccctccatcttgctgcttgactgcccctcagtcccagaaccagagcccgtgctaaccccagcactggagctgctctgacgccgactgcaacagccattctcttctcgtagcagcatggtcggtccagctccggccatttgcccggaggcctcctctgggcctttcaacttcctaagcacctttcaggttgggtggtccgagatctcgcgagcgctcccgacctctttcctttcgcgagatcccctctcctccccctcctagtctcctcggcaacggcacagatctcgcgagcttctcctacttctctagcgctgtggctcactgaagcgtactacgccggatgtcttaagatatcgcgagacctttacctctggtttcttacacatcctttagaaactggaatttagcgagaatacattctttcatactgcctcctcccttgtttttctgtctcagagagatagtctgtcctaaatatcccatgtagcccaggccactgaattaaaacggagcgtattcgttctctgccccaccccgcaactcctgaaagcggcgcaactcaattacttgatccttatatgccccacgcgggactcatactacgtttcccgtgaacacgtgcagtccaaaccccgcccctgatatttatctcagtggacggtggccggaaaaggacaatggtttccatgtcagcggataaacgctctcccctcggctcccggacgcgacggaggtcgtagtagtagtgagtacgtgctgaggagcaaaggagtaaccaagagatccagtgaccgacagagcaagagccatgccgcgccggggcctggtggctgggccagacttggagtattttcagcgtcgctatttcacgccggcggaggtggcccaacataacaggcccgaagacctctgggtatcttacctgggacgcgtgtacgacctaacgtcattggcacaggaatacaagggtaagggccacacgttgggccggggccggagtgtgtgtgtgtgcacgcgcgcgtttgcctggttctcgaagggctggcattgacagtggctgtgctgctcttttcaagggaacctgctgctgaaacccatcgtggaagttgcaggccaggatatcagccactggtttgatccaaagaccagagacgtgagttatgctggaacctgggattgtgggtagaggaaatggagagcggggatgggaaggaaaggcggaggctagccagagcctaatggctgctctgacaccctcgccccaaaccctcctttaaagatccgcaagcacatagatccgctgaccggctgcctgaggtactgcaccccgcggggccgctttgtgcacgttccgcctcagctgccctgttcggactgggccaacgattttgggaagccctggtggcaggggtcgtattatgaggtggggcggctgtctgccaagacccggagcatccgcatcattaacacgctcacgtcgcaggagcacacactggaggtgagaactggtgacaaggagcaggttagaaggaatggggaatcccagcaaatctccaggccgatcttcagggcaacattttttccataaccggtgggagtgtattttctgtcctttacattgaggcaactgaggaaagcacagcacctaggtccccagggttgggaattctaggagtgtctgggtcacagggggacaagagactcctttataagcctgggaacagcagttcatgtatcttagtgatggtggtccttcgaagctcttacacgccgttttggacagcaattggactttctttttaatctactctgttgcatggatatagtgaggggacagttgaccctttatggccatccggtagttagaagtggctgccattaagatctgtaggactttagggtctgctcattgcatgctggagtttcagcttttttttcccggggccgtagagtacctgaagctgctatctgccaagggaggcactttgatcccagcgtgtgtatatgtatactccatccagaattctgggggtggggtgcttctgtgttctccaggtgggggttctggagtccatatgggaaatcctacaccgctatctcccctataactcacatgctgccagctacacgtggaaatatgaagggaagaacctgaacatggattttaccctggaagagaatgggatccgggatgaggaggaagaatttgactatctcagtatggacggtacacttcacacacctgcaatacttctgtacttcaatgatgatctcacggagttgtaggcaaggagatgtacactcgtgtagactcaagacgtatttcgagtttggctttttctgtgccttgaggaaaagtggtggggccgaggggtgcctggacccagatctccactcctctccaggagctagcctgtgcccttctgaagtgtaaaggccctattccctgccttcattacagtttgctctgagaaaattagtgaattaatctttgggaatgatacaagaagatcaagtaccttggtttagggagatgtagaagaggatagtcagagttcaggcagaactgtttgatagttaagagagagtagttctacaggggtgagggatggaaggacttttttggcaatgatggaaatgagatgtctgcaggaagatgggatttacaaagaaataggaaatgtttatcattgaccatacaaagctggcttatcttacttgtagaagagtgtttggcagctgaaacccaagggaaagaaaggaagtgcgtcattataggcaattcaggctagatattatactaggtacttcatataccctcttttttttttttgcccccaacaaagagaaggggtcttgctctgtcacccagtctggagtgcagtggcaaaatcatggctcactgcagcctggagctcctgggcacaagtgatcctcccatctctgccttgagtagctgggacttcaggtgcacgccacaatgcctaattttttaattttttgtagacacagggtctcgctgtgttgcccaggctggtttcaacctcctggcctcaagtgatcctcttgcctcagcctcccaaatagcctcttcaagacaactaccccataaggtggattaccattactatgttacagataagtccttcgaaactttggaaagtttaatagctcaaagccacactaggtagtaaccactagagccagaatgcaaattcaagtctgcccaactccaaagtccatgttctctcaatataaagggaccatctcaatgtctaatctcatgttaacatttgtagccactgctctcagcaagtatttgggatgtggctttgtcctaggatccctgcacaataggaaattgtggtcctattgtatagtttgcagttattgtctctggaagggagtttgcagagttctcctgtggcgaagaggaggcaaggaaggctaagtgtcagttaagcaatagctattggggctacttctttgttaatcccataccccagatttctctcctgaccttttggggcaaagaggtgggtatttactaacttgaaggaaaactagagtggggaaaaggccggcaaattagtgacactttggcgagggagaaaaaggaggcagtttgccacttggagaagatgaggaagacagggttgcaagacggtgactccaaaagagggagctcgacaggggtaatgtaaacagagatgctaactaagtcagaaaactctcctggtgaccaaaagagaaccactattgggggtaatggctagatttggtctcctttaacttaaggaggggagatttgagaatgacagacagttgaacttcctggcagcagcaagcaaaaaacaaatcaggaagagtttagtgtgtcttctggcaggggacaccagggcccagcacaggagaaggtggcccctgtgagatactggtgggctatataggcattttctgaggggctttgggaggcatgaacaaaggtggaaacattgctgttggcttcggcagtatctgaatttactgtgagatggagggtttaaatctaaccccatggaatgcaggagtccatgaattatctaaatcgatcattttgatctttaatcaactctgcaattatgtgtaccttgtttgctcaattaaaccctgaactatttgagaatgaaagctatgctgttcctctagtgcaagcctcagggcctgtcctgtgcctacaggatgtccccattctgccaaaacctgtccctcttccagagactcctacttcaatgtctcttgctagaaacacatccctttcctcacacatccagtcactcatcaagtgtaatctgtctcctaaatatctctggaacctatcttcttttctccaagttaccatcacctcttgtctaaactgctacggaaacttcctaacctgttctcccatttccacttctgacttccatgctgcaatgagagtcagctatgaaaaacaaacctaaacatcgaactttccttagcttcttcagtggcttccaactgcttttggaataaagtcctaaattcaaagatcttgtataaatcaggctcatctcgcaacacccctctttgttctctatggcctagacacactggctttcagttcattacatgtcttgcctcagaccctcacacactgtcctctctgcctgcaacactcttcctttcactttccacctagctgatcctaaatgttccttcctcagggaggtcttttctgatttcttggtgggtcaagactttctgataaatcagttagcaccatgcattttccagagtttttattacaattgtaaaattatggctgtaataggctggctgcgctgctagattgtaagctcacgagggcagagatcttgttcacatcttgctcactgctatattctcattgctgagcacacagttgcagctcaataaattttgaatgaactccaatgttaagtgaactcatccgtctatacctagtgggggggatgttgtgtcctagtaggcaaggaaggaccaagaaataggatgtctggttcctgtgctatagtctctatccataggattcactttccttgcttccccaatatccaaaaccaaaagttattccatagagggtctctggccaggtgcagtgactcacgcctgtaatcccagaactttgggaggccgaggcatggggatcacctgaggtcaggagttcaagaccagcctggccaacctggcaaaagcctgtttctactaaaaatccaaaaaattagccgggcgtggtggcacacacctataatcccagctacttgggaggctgaggcaggagaatcgcttgaacccgggagatggaggttgcattgagctgagatagtgccattgcactccagcctgggcaacaagaacgaaactccatctaaaaaaaaaaaaaaaaaagttaaaaaaaaaaaagagggtctcaccagatttttgggggccaatccatctgtcatttccccatatggccaccaggtggctgtaattacctatagagtcagggagacaagcctggagggaaaacccttccaaagttaggatgggaaggtggcctttggagatttataagggggagggaaggacaagaaaacaaggaaaaaccacatggccaccgttctattagcattaggtttatgcctgcttttttttctctcacaagcacatggcaggaaaggagtgcagttaggaattcatgggctagaacaaaaaggaggtcctgattacaggtatgggagtgtatggggcaaagtatggagctgacaaagggataaagacatcacaaatttttaaaataatagaatgcattcacttattaatacttaaaaaaaatctttccagtaggcactgctttgttctctaaatagccaagtggatatttgcatgaggagtatgtaaataatgctttagcctaaaacccagaaagcaaacagaacatgagtgtagggtccaagtcctcttgtggtaatctcttttgtgttagagggtggtgggtgaaggatggaatgctgaagggaaggctgccgtcctcagtgaatcacagcagcttcaaaggactcaactggcaagatttcccacaggtgaggtccctacatgcccacattactgggggtcataaagaggcatatgttccttgtaggaagcttgcctgctcactgggataaagcatgcacacatgaaaagataaatgaacatagtacatgataaaggcttaagttatggtatagaaaagtttctacccttacagcaagtcacaggtggattactaacctggccatcctgaaactgtttctaaatactctgtgtgtgtgtgtctgtggatgtgtattatttttggaaaatggtgctataatttccatcagattctccaaatagcccaaccccctactcctactcctgaaatagcacgcacacacacacatacacaacaatactttaaacagcctcaaaagtaaaatatcaaaagttataatacaatgtggtcccaatattctggcatctgtctcaatggtctgcctcagcctgtggcagaaccatggcaacccatggcagaaattcctaaagctctaacctttggggctaaatttatgacgagtctcaagtgttttactactgtaccaaatgttaatctggctgtaccttggagctgagtaaagggatccatcatttggtcttgatactataacatccaatcatacatcacgataaggttaatgcatccagcaccacagctaagtttagggaggccacatggatgggctgctgttgggagaacagccacttgatcatgggtcagtagagtacacggtttggctgtaagaatgcacacagaattagaaacctgactgatctttatcctggaagccaaagattaaggattcaaaaatacaaatggatatgcaccccaagtactaggtattctaggcacaccggaagcactaaaaagaaaaacccaaaaagctggtgaatgaataagtgaagtgaatccatcaaagtgggaatgggagtaaaggcttaagtgcagtggtgtgatcatagctcactgtaacctcaaactcccgagctcagacaatgctcctgcctcagagtagcaccaccatacctggctaattctttatttttttgtagagacagggtcttcctatgttgcccaagccggtctcaaactcctcgcctcaagcaatcctcctgcctaggcctcccaaagtgttgggattataagtatgagtcaccgtgcctggccaatattttaaataattgtgtgcctggactgggtgtggcagctcacgcctgtaatcccagcactttgggaggcagaaggatcacttgaggccaggagttcaagataagcctggccaacacagtgaaaccctgtctttactaaaaatacaaaaattagccaggtgtggtggcaagtgcctataatctcagctactcgggaggctgaggcaaaatggcttcaaaccaggaggcggaggctgcagtgagccaagatcacgccactgcactccagcctgggcaacagagtgagactccatctcaaaaaaaaaaaaaaaaattatgtgcatgaagcaaagtttgtgttaggtacttgtgtgtagaattttctacttgtggtatcatgtaggcatgtaaaagtttccgatttaggagcattttgggtgtttgattagggatgctcaacctgtacatacacatacctatatataaacatattatgaatagagtgaaagtactataaagacacacagaatcacgagagcgatggctgaatgatcagaggcatgtctgaggagatgctcacatgactcatctgtattacctgtagagctgcatttaccaacattaatcctcccaacaaacttaaggcataggtacgatttttatttatactgaaaaacaacactgaagcagagagagattaagtaacttgccaaaagtcatacaactaatgagtaccaaggtagtcatagcccatccaactaacataccgcctccctgcatgtcaaacataggatgctattctagttacctaccactgctgtattttgccaatgaatctgcaatatgggtagggctcagcagggacagctcacttctactcccaaaggggtggactgtggggagctggaggatccactttcaagatggctgtctcacatagctctcaatgctatcagtttttctccacatgggcctctacacagggcagtttgggcttcctcacagcatcccaagagaaccaagaggaagctgaatcatatgacctagcctcaattccaagggaagggaactagctcccacctctcaccgggaagagtctcggaattacactgtaagaagaacatgtgggatgtgagacataattgtgggcatatttagaaaatacaatccaccagagatgcactggaggtaaaaggggggtatccagcccagtctagggtggagtggaggggtggtctttgaagggttgtgtgtaggggagacagggcattgatacttgagcctttcttgaaagcctaggttggaatcttggccctatcatttattcaattcattaaaatgatactgagcatctgtcaggcacagtcctggaaactgtgaatacaaaaattaatgacacagttcctgccctctaggagcttacagtttaatgggagactcacggaagtttgtgattctcttaatttgtcatcctgcttccttatttacacagtagccatggggaactttttttttttttttttttttgagacggagtctcgctctgttgcccaggctggagtgcagcggcacgatctcggctcactgcaagctccgcctcccgggttcacgccattctcctgcctcagcctcccgagtagctgggactacagatgcccgccaccaagcccggctaatttttttttttttttttttttttttttggtatttttagtagagacggggttttaccgtgttagccaggatggtcttgatctcctgacctcgtgatccgcccgcctcggcctcccagagtgctggaattacaggtgtgagccattgcgcccggccgccacggggaacttttaaagttcccatgttaaaagtcttcaaaggcaacctacttctcttaagatgaacttagaaacccttaccatggtccagaaggtaagatttggctctttcaggctcttctttgtctcccacgttggcctttcagtttctgaaatgccccccaagctttgcatcagagccttcctacatgctgttcctctgtgtggaacaatccacccaccactcttcagttggccacctggctccttaaagttgcttaaatgacactttatctgatacctccagttatgtcaagtcccttaacacgccctccccagggtgttctgaaatgccataattataattaaaatatttagtgtaattcactgtttaatgtccattttcttcccttcttagactgtaagtaccatgggggcaggggccacagctctcatttatgaaatactcagccctagcccagtgcccagcccagagcagtcactcaataaatacagaatgaacaaatatttggtgaatgctacaaaagagctaagtatgaaacacacatcaggagaacctaacccagttcggggggaccaagccttctggggaagtatcatctcaagctaagatttgaaggacaaggaggagtcagtcaagtggggaggacaagggataggtggaggagagaatggttcctgcacaggataagtagcaaatgcaaacgtagattggagagtttggagagctcggaggcagaaggaactgtagcatggtaaagctaagaggaaagcgggaggcgggggagggaagccaatgagagacgctgagccagaccaaatcatagaaggctttgtaaaccaggttaagttttatttttttttaattgagacataattcacataccataatattcacccttttatagtgtacagagttaagtgttttatgttttgttttgtttttgagatggagtcttgctcttgttgcccaggctggagtgcaatggcatgatctcggctcactgcaaccttcgcctcccaggtttaagcaattctcctgcctcagcctcccgagtagctgggattacaggcgtgcaccaccacacccggctaatttttgtatttttagtagagacggggtttcaccatgttggccaggctggtcttgaactcctgacaatccacccgtgtgggcctcccacagtgctgggattacaggtgtgagccactgtacctggcccagagttaagggttttatagagagaatcacatgatcagatttgcattttcaaaaggtgacttgactacaatgtcaagagagaaggaaatgagggagagaaagtggagacagagagacctgccctaatgcagtagtccaggtgagatccaaaggcagccagaactaggttagtggcagtggagatcggagatgaaatgaagagagaattgcaggacttgataatttgggtaggggtctaaggcaaagggaggagtcaaggatgacacccgtgtctggcctggatgactaggaggatggtgagtccactggcagaaaaaggaactgctggaagaggactttgggaaggaaagtgatgaatttttagttagctgtatgaggtaactcgggcaggcaggcacatgtccagatcttgttggatatataggactggatcctgaaagacagctctgggctagagttataggtgtgggaattattggcagatagcagctgtagccagtcaaggatcagatccccttaaggacgaagtgcaatctacagaggtttggggaggagaaaaggacaccacaaaggaagagctagagggtgaaagaggccaagcaggaaatgttgccacagaagccaaagagagagcacagaagagaggggagcggccaacagtataaagtgctgcacagaggtcacgtaagatgaagacctgagcgaccatggattcagcaaacagcaggtcatggtggctttgttagagaagccaggctgcagttggacaaggtatgcatgggatattcttagaagaaatctaactgcagaaaggaggagtgttctggctttataaccatgcacagaatatttaaataccttcctttggattccatttcttcaaccataaaatacagataatagaaagtaagatgacagtagggcaacaggcaagacccaggacatggtaccctaaaaagatgctaccttatagtgttgttgagaagattaaataaggaatgggaacctgcccagcactataaagagtccttggaaaagacactcagaaaaccttagttttctttcccattccttgtgctagccattctttatttagtaatgaatcctcccctcaggattttgagatttggcatttttcagcatccaggtaacatctctcatgattagaaaattacagaccgtatctgtgactaacattcagtttccaacctaacaatagtgtttattcctccattaggagaagtttttgagtcaagtaaaatatggtttgtttcatatcatgccagaattgagcttctttatacagtgatggaaagcaagggaatggggccaactactgggagaagagtaactaaagtcagtcctttgctcctaaaggattttaaggtgcttaagctcgtaactcaggttgtgaatcttctcaccttgcagtcatcttaagtgaacctctgaagagagaagtggctaacagtaaacttgatggtttagaatgcagctaccaattatcgagtaccttattacagccagtgctttatgtaagttagctcacttaaacctcaccacaaccctttgagataggcattaatacaccattttacagatggaggagctgagacttgagggataaatagcttgcccagggtcatagttattaagtggcagagcttggattccaggtgctacctttctgacaccaaagctcaaactcttcctctaatgaagtgagtggataactttattattgactctgggatacattttaggagttctacagttttggaatatagaataagttgatttttaatgtattaattatatctcattcagtctgaaataaaaatgatgctcagtcgagtgcggtggctcatgcctataatcccagcactttcggaggccgaggcgggtggatcacttcaggtcaggagttcaagaccagcctggccaacatggtgaaaccctgtctctactaaaaatataaaaaattagctgggtgtggtggtggatgcctgtaatcccagctacttggaaggctaaggcaggagaatcgcttcaacccgggaggcagaggttgcagtgagccgagatcacaccactgcattccagcccgggtgacagagcaagactccgtctccaaaaaaaagaaaagaaaaaaaaatattttcctttacagactggagtgctagatggtgaaagggcccaagagcaagtgaaggggtaagaggaagccagtgtgggttagcatttcccatgacaaatttataacctaaaggatagttaatcagctgggaaaagtgtgcaattctgctggaacaactggggcttgaaaacagatgaaaagcaagatacttctagctggccagccaacagaaaactattaagaaattgttaaaaagcaatgtcaaatgggaaaaagtttggtttttgccattttgtataggattattcagtttccatcacagtggtcaatcgaagaagatctacagctgggcatggtggcccctgtgcttgtaaccccagctactccagaagctgaggtgggaggattgcttgagcctgggaggcagttactgcagtgagctgagatcatgccactgcactccagcctgggtgacagaggaagactctgtcttaaaaataaaataaaataaaataaatttttaaaagcagatctaaaaaacttgcagaaggcaaagacaacaattacaacaattttaggcttacatcttcctccttctgattaagatgatattccttactcagtgagagcaaggaaatggatttagctaaaaggcagcaatagaaggatgagcagaccagataaaatcttttaatcaattaaaaaacaaaaaatcttttaatcgaaaagatatattgcagtatttgggttctttattaggtactggaggtacagagaactattccatagctcagaagttgagttacttctattttaaaatttatttattttggccaggcacggtggctcacgcctgtaatcccagcactctgggtggccgaggtgggcagatcacctgaggtcaggagttcaagaccagcctggccaacatggtgaaacccggtctctactaaaaaaaatacacaaaaattagcccagtgcagtggtgcacgcctgtaatcccagctactcgggaggctgaggcaggagaattgcttgaacctgggaggtggaggtttcggtgagccgagatcgtgtcactacactccagcttgggggcgacagagcaagactccacctcaaaaaaaaaaaaaaaaattgtagaaacggggtctcactatgttgcccaggctgatcttgaactcctgggctcaagtgatccacccaccccagcttcccaaagtgtggagattacaggtgtgaaccaccacacccaaccagaaattatttttctaaaaagatgccacaccatcatatcgagctaagcacatctagaaacaaattcattatggcctcttaaagccagcttctttctcaattgctattaacaatgtccaattcttgagccatcacatcatctaattttcttttttcaggtctactgtggtccatgagtttaggcataaatgcccacctctcaatagctctgaccttgagcaagatatttaacctccctttgtctgttttctcatctgtaaaatgagtattaggatactttctactttataaggttattgaaaggagtgagtgagttagtacatattaagtacttagttcctggatgcagagtaaaactcaataaaagtcagcaatcatcatcctattgttcatcttttgtacatatactttactacttttgtattttttttctattggtctttttcttattgttgatttctatgacatctttatttcatcaagaatacaaacactagctcgctatcttcctttatacccccttactcctgctgtaatacaatactggagtaatcctggagccagtacccgaccccagcagcttcttgatcactgaagaaataggaagtagatctctggtgggccaggtctaaaacgttcttctttctttgaggtggagtcactctgtcgcccaggctggagtgcagtggtgcaatcttggctcattgcaacctccgcctcccgagttcaagcaattctcctgcctcagctttccgagtagctgggaatacaagcacgcaccatgatgcctggctattttttgtatttttagtagtgatggggtttcaccacgttggccaggctggtctcgaactcctgacctcaagtgacccacccacctcggcttcccaaagtgctgggatggcaggcgtgagccaccaagcctgtccttacaatcttcttgtcactctggaaaccctgtctgtagttcttctttggcccttccaataattttgtaagccctggtttcctggataaagtatctttctgagctagagtagtttctgttatctctgagctctattagagcacacagtatttactgaataaaatggtctgtcattaatggcacaaatattttcctagctagtcttttaactttatgttttcttacacagtaaaatttagtttcattgagttaaatctatccacgttttcctttaaagcatccacgttgatgcttgttgtacgcttaaggcctttttcacccccaagatcaggaaaatattcacccacactttttatatctcattctagttctctaaaaaattttttggtcttgctgaattgagcagaattacattttttgttttgttttgttttttgagacggagtcgctctgttgcccaggctggagtgcagtggcacaatcttggctcactgcaacctccgcgttcaggtgattctcctgccttagcctcctgagtagctgggattgcaggcatgcgccaccacgcccggctaatttttgtatttttaatagagacggggtttcaccatgtcggtcaggctggtcttgaactcctgaccttgtgatccgcccacctcggcctcgcaaagtgctgggattataggcctgagccgctgtgcccgggcaatttttgtttttaatgtcactatttaatccatctgaaaactactttagtaaatggtaaggatctaccttttatattttcacaaatagttttccatttatcaattatgcatcattatttatcaataatcctttgccccactgatttaaagtatcacctttgccatatattaaacacttgaagcagtcaacaggtatttccagggtgcctaatgtgtgcctggccgtgtgctagactgatacgacagtggagaagggtgacagggcccctcctctctggagcctaatgagaaagataaaggataatatggtagcacataggaggagcacctattataagcttggagagtcaggggagtttagtgcatgcctgcttactgtgtgtcaaacacagtactaacgaccttaaaagggtaattccattgacttggtaatattagggcttcacaaaaagacttatatgttgccattttagttgaagaaactgaaactctgagaagtggaagccgcatatgaacccagacctgtctcccaagcccaggttcttaagtaccatggctgaccactaatccagacagcactgcctctttgaacagggactgacaaggaggagccagagaggcaagggaaaaaccaggaatgcgaaactacagacgtcaagcaaattctttttttcaaaaagggggtggtcaagtgaagaactaagaacatcctctgattttcagcaaccaggaggttgttggtaatttggtgaaagcagctgtggtgggggcagagggctggaaaatgagtagggaagtagacactgagggcagttaatgctttcaagaggcttggctgtgaatggacacagtgcggtaaggtggcagctaaaggggtccagagtatttctttcaaagataaggagatttgagcacattttaatgtgactgggaaagagcaagtggaatcggaaataaaggactgagttagaggatcgctgctaaccattagtccctgagaaggtggcaggggtgagactaagagcccaagtataggcattagcttcagacaggacaggaggacaggataaaaggacaaatatggatagagttaaacatgtagttgagtattggaatttcaagggagttctcatatgataatctatctcctggaagtagataagattttctatccattatgatattaaaatgaacataggtatccttttctttaaaatgaactagtgtaaggagaaggttttgaggaagtcactgtggagaactaaaagaaagctgactaggaaaaaggattcctgaacagaaacactggtctgaatggtcatggtgttttcttcagcagccctttgcatcctgggtgtaaacaagcaaccaaagtgatacaaggccaggggtttgcaggaaggaaaataagaagagggcaccaagacagtggcaggagcatggttaaaatgatagaccatggaacttaagctggataggaaaagaggtgaagatggtatagctgattaggagaaaatgaggagctaagggactacattgtctcatggtgggtccaagaacagagtagaagtaaatgagggggctagaaggatagaaagttgtggcccaagttgggggtttgaatttaatacttcaaaaggaagtccagagatggggccagaagtgggatggctagaaaggtctctggaaataaggggatcaagggaccaaaaagtctgggtgatgaatagatcattcatgtggatcctaaggtcacccaagatgatggcaggactaagccagatgtcagtcttcaatgaatgaaggaaatgtcaggagataagtagaaaacactgaggaagagaaggtaaggagcacacagcaagactgctgcagccttaaagaaataggggcttcttacacaagatgagggaatctggaggcaacagtagagataaagaattagccaggtgcagtggctcacacctgtaatcccagcactttgggaggccaaggtgggtggatcacttgaggtcaggagtttgagaccagcctggccaacatggtgaaaccccatctctactaaaaatacaaaaattagctgggtgtggtggcgggcgcctgtaatcctagctacctaggaggctgaggcaggagaatcgcttgaaccaggaggtggaggttgcagtgaaccaagattgtgccactgcactccagcctcggcaataagagcaaaactccatctcaaaaaaaaaaaaaaaaaaaaaaaattaggtcgggtgtggtggctcacacctgtaatcccaacacttcagaaggccactggtgggaggatcgcttgaggccaagagtttaagaccaatttgaacgacacagcgagatcccatctctacaaaaaattttaaaactatccggttgtggtggtgtgtgcctgtagtccagctacttgggaggatgagggaggaggaaagcttgagcctaggagttcgaggctgcagtgagctgtgatcacgccactgcactccagcctgggtgacaaagcaagaccctgtctctaaaacaaaacaaaacaaaacaaaaaaccctccataagtaatattttaatggtttctcacaatctttaattgatatttaacttcctcactaaaactggctttaaaggtgaccaaatgacaagtacaatacttttcttggtttgtactgttttttttttagagacagagtctcactgtgttgcccaggctgcagtgcagtggtgtaatcatagctcactgcaggctccagctcctgggctgagctctcctcctgcttcagtttcctgagtaggtaggactacaggcatgagccaccatgcctggctaatttttaaactttttttgtagagatagtcttgctatgttgctcaggctggtcttaaactcctggcctcaagcgatcctcctctcttggcctcccaaagtgcactgggattacaggtgtgagtcactgtattggctggtttgtattaaaaagaaattcagatagaattaatataccttattcaccattttaaagtgaattcaggggtttttagtatattcacaaggctgtgcaactatcaccattatccagaattccagacatttccatcacccccaaaagaaaccccatatccattagcagtccctcccattcttcccttccctgaaacctgcacaaccacagatctactagttgcctattctggacatttcatataaatggcatcaaataatatgtggccttttatgtctaacttctcttacttagcataatgttttcaaagttcatccatcttatagcatgtatcagtattccattcctttttacggctgaataatattccattgtatggatatactatatttatccattcatcagttgatggatatttttgtttacactttttggctattatgaataatgcttctatgaatattcatgcacaactttatgtgtggacatatgattcaattatcttgggtgtacacttagtattgaaattgcaaggtcatatggtagctctatatttaactttttgaggaactgtcagtttgtactcttcttgattcccacgaagcatctagtatcaatgatcatgccttccttctgaagctgtctgcctactctaccataacaacactacctggtacacttaacacttgaacaacttgtttttctttggctactccatccttcaaagttcccccaaggttctgacctctactcttcacttgatatactaaaattcttaccctttaaagaggtactaactcctactataacctatcatgaacttaccactccagccatatgaggtctacatactacctactaaattctttcttatcccacctaaactgcccttttacttcctctttgctatacaaatctcagttatttgggagctaacctcaaatgcaactacatatgaaagttatttacttgcttcccccctcccaaccaagaaagagctttcttctctgaatgctgattttacagcccataaccatcatcacaatcatatactgctacttaggtttttatatctgttttaagtctttatctcaaaaaatgtccctcctcccttcacctagtcaatctcttgatcactaaaaaattttcaaattgctttataagatgtacaattaaaaaataatttccccttcccagtggcaactactgtggtttcctgtatattcttccaggaatattctatggatattcacatatttttttctttcataaatgttaccatgttatatatgctcttctgtactttccctttttccctctcatattttaattattctttaaagtggaacctcactaatgttttaaaaaccctaactacattacatctactgattgtactttgcttacacatttttcacttcaaagaaccagagattcatgaggaattatttctttagagaagtcatactactttttatcccatttggctccagttgctaacgtaatcaatgaagctacttaattttgtttacataaataataaatactttctcattgtaaaaattcagaattatcaatgaagcaaacaatcccccttgactattttttcctgaaagtaaccaatgttaccagtttggtatgtacacttccagcatttttaaaagcatttaaatccaaataaatgtatcagtaaaaatattattgttttaatttctttaaacataaactaaatgatgtcattttttttttttttacaagttgcttgtttccattcaacaatatattaaccatgtctctacatacagaagtaactcatttttcttttttctttttctttttaatggcctgcgacacagccccaggaaatcctgagaacatgtgccccagtaactcctttttcttaactgctgtgtagtttgtttagctattccttactgttggagatttagggtgtttccagttttttgctgttacaaacagtgttgtaatgaatagctctgtaatgtcaccctatgcataagtatggtgactgtttctctataataaatggtgagaagtggaactctgtgtcaaaaaacactaagtttataagtataacacatactattaaattggccttgctagttttgtggcatagttgttatagttaataacagtaatatatgtgaccatcagtttcacatattagtgtcctttaaaactctaggacatctcattgacttaaaactcatgtagtatatagtagaagaacactagattggaaaccgaaagataaaagttcaagtcctggttctgtctctaactactaacttgatcttaggtaatcctttcaatatctaggccccagtttctatacctataaaattagattaaagtgatattttctaaaatatgtacctatattattagtagcatgcaagatgcttttacttttattgatttttattttaacaatattgcattttaaattagaaagaaaaacataattacagtatcaaattaaagacttatgaatattatttctagcaatataaaatttaccttttaaagaacattcatttaagttaaagaaaggtgagtgatttaaagaaaaatagtatgcatataatggtatagctgatatatagatatggcaaatcatgaatatgatatatgaaggactgaagtttcctccttgataaaatcaagaacaggttagattaaagcagtaaatcctagacttttagattttaatgatcaataaaatgtaaaaaaaaaaaaagttagtgatcaacatggggttgctgacttttcattgtgctgagtaaggacattaagaacaacaaaattcataatctcagcactgtgggaggccgaggcaggtggatcacctgaggtcaggagctcgagaccagcctggccaacatggtaaaaccccgcctctgctagaaatccaaaaaattagccgggtgtggtggtggcacgcgcctgtaatcccagctactcgggaggctgaggcaggagaatggctgaaacccgggaggcagaggttgcagtgagctgagatcgcgccattgcactacagtctgggcaacaaggatgaaactacgtctcataaaaagatatttaaaattatttaaaatgttgtataattataaaagaagtacatgttgaaaattttcagattgtacagtaagtataaaaagtcattttcttattcttttcctcccccttccccactaaaatctactcacattctgccatacagatctatctcagctttagaaaggaagtttttaacattataaatatgtatatgtgtatatatgtttaataatatgtaacataatttataacataaaatataagcatatatacatatatttatcctatataaatatactgtatactatatttattctatgtaaaaatatatatcagaaatatatcctctcagaataaaggacagacttttccagtaaaggacatgtggcaacctttcttagccatttgagaaccactgatttataagaccttccatctctaaaatactatgattaggtctagactatcctgagtatttacatgcctttcattattatcactgacctacatatttcaaaagacaattaggaatctctttaacatatccttgggtagaaaatcatagattgcaagtgttttttcagtcttttactctgcttgttgtatgagtacatgtctgtgctctatcactgattatcactggttccctacatcagagttttaacctggggtccaagacttcagggtattcgtaacaccgtgaaaacatatgtgacattttgtgtgtattttttttttctggagaaagtttctaactttctacgatcctaaaaggttagaaattattgctttagatatgtttcttgcttttgcgttaaataatcttattcttggcttgagagtcccttaaaaatttttcttcatttgcatttcacagctgaatatttgagttctttgttctcaccttaatagtcttctcattaaaacaaaaaaaatattctcctgtacccattaatcataaggaatttaaattttttatttaatttttattttttgaagtactgaaagacagaagaaggcagagactgatgccccacaatgaaagtgacaggcagggagacaagcagctagacagtgagacacacaggcatagataaaaggcctaacgacagagagactacacaggcaaaagaaatatagagaaacctggaaacacagaaggagagatgcaagaactgagcagacagagaagagggatggcagaaaaataggctggcagggagggaatggagattgactgacagagaaggcaggcaaaatcaccaaaagggatgcagacaggcaaacagagagagagagaaagagagaagaagggaagacagataaaggaagaaaaaataaggtaagaaggaagacaaagtgataatggtgttttatacaacatagtgctttataatttataaagtgctatcacatacattactgcaggcagacagggagaatccagcagacagatggggtgatggaaggatacaggccaatcagacagaagagaggggagagggccaatcagaaaaagaggctagaatagagatcaagacagacagataagaagaaagaaccaagaaaagagaagtaagagagggaaagagggaaagagtggagagacacaaagatagaggctgaaacagttaaactcaggaaaacaggcagtaaaaaagcagaaatgaaagaacagtgcattgtgtgtagaagttttattatcatctttttcaaagagacctggttagaggttgtgtctttgtctccttcaaagagttataaaatgtctctaaggtggcatgtgagtggagccagaaggctttaatcaggagaaagctttttagactaggaggaagacaaacttcttaggcctaggtcgacaacctaaaggatctggattcacatgaccttacagaattcatatagactaagtgagaaagcagggcagtcctctacctactctgtgtgcatgtaagctcagcttactgttacttattaacagtgcctatatttatagggtactttttagtactaccggtgctttcatgccttctccaatacacatttcagtgatgaagcgaccaacaaagatgtcttgctggcatcagaccacttaccatgcagagtagactacatttggagagagtaaagccttcctgagcactcctcaagtactggtagtgaacgcatgcaaccagtaactagtcaatccaaaagacacgtgctttgggtaacacttggtagaatcaaaaagaccagagatggcaagcccagccaagttagttaggagtactgacagactgacagaggaaggagcatccagaaaaactggaagaaaagtagggaggagtacagcaaaacacaagcaaaagcaagcaagcaaaaagacttgtatatgtgtagacttttctctggagcagtatccaggaaatgtgaaacagtggctgcttctgaggagaggaactccgggactaggggagaaggatgggagacaggtttacttttcacagtacactttctgtacttttaaaatgttgtaccataagtatgtactacctatttagaagttaactggaaaaagaaacaaaagaagagagaaaagcaagaagagacgtggacagcaagagcctgccaagcagacagcaaaaaggcaggaaggcagcgagagactgggaaaatggcaaaaagactgagacaggcagactgtctgaggaaccagaaagacagaaaaagagataactgaaataaaggcaaacgtgagagaaggcagggtaggggatgtggcaagaagttagataagactttgaggcaaaggggttactgagaggtttaggggagagagactatcctcattgatggaagttggcagagaagaagcaaaggaagaaaaagctggtaagtatgaagactaaagagagaaaagcctgaaacggtgggatagcagcaaacagggtagacaggcaagagagatctaaagggaggcaagggaaaaggaggaacttaacaggcacaaataagagaaggaacaagcagaagggcaagagaagaggcaaaccaagatggggagccgtggcagggcctggaaggtagacaaaccgagagatgcaggctaaaaaagtgatagagacaggcaggcggggagacagatggctagagagagagtggtgggcaaacagccagagaagcagacagacaaccagagaggaaaaagaggctgccagccagtcagggaggagcagacaggcaggcaggcagacaccataacaggagcaagcaggtaaagaggcagaaataaggagagaagaagaaaaatcaagaggtcaggagagagagagagagaacagaaagagatgcagacaggcaaaagggaggatggatgagagggagaataaggcaaattagcaaatccacatgcaaagcacactcaagagagagaatgatgagtgtttgtatagggatgcacacggccacctttagccacccgcacctgcagatcatggcacatgtggcaagcagaggctctcagtatagggagagggcacagaggcagagaggctgcggcgcacatgatgcgcagtgtggcccacatacacgtggagacacttcccatacacagtatgatccacagacacacacagaaggggccagaaagagggggagtcaggcacacatgaggaagagccacacacagtcagagactggaagacagaagtaagcagaaagaagacagagatggaaagtcacgtagaggtgacagagcctgagggtccaagggatgagaaggatagtctcagttaaaaacaaagacataaatagagagaagcccacaatatagaaagggggggataaccagatgaactagtaaagagggacagagaaagaagacaagagagcaaaatcgacaggaaaactggaaaaggaggaggagttagacttagtacagaaatgatgtgggaaccaaagcaagagaattccaaaggccaggttaaaaaaaaaagagatggaaaccaacacccaataaagtgcattagtgtggggagtggaacattaataaagaacattttagcttcataaacaaaaatgtgcgtcatcttcccagtcactaatactttctggttgctgcccacctacccctccctctcagggtgctcctgagcaccgccgaagatgggtggccagcagttacactggagaggtagaggaataacccagagagaaatgattccacaggcatggaatgggaagcaagggaaggggcaaagggagatcaaaggaatgggaggaagctagagtaagaaagggtcaacaagaatgaaagagggtagaactgagctatttgccctccttcctttgctccatttggcaaggatcattttctgtctagacctctctgggcaaatctctgtatgagaaagctactttgggactcctttccaactgtccaattcctggtaccactttaccataaacactggggtacagttggaaatcacaggtcagaaagttagatgaaaacgcctgggtataacccctacctctgctttttctcagttccagctcctttctctttcacggtacctcagttgcttctactttatcggatagtgttggagatcatggagggaaggcaaatatactgaaacggaagaaaagagaacataatttcacgatcttcagatttgactctttcctctttatcctaaaaatttgttgtttaccccccaaattaatttctcaagtcagttgaattttacattctaacaattggaggaggggaaagcgagggaaaggggaaaagagtaaagataaaatttataacaattataaatcactgaaaaggctgggtaaaggggagaatcaaacatggactcctttgaaaaaaactcaatcatcgtatctattcatatctctcccccaaaagtcactaggatttctatcactttttttaaagaaagcagaaaaaaatccagtcccgcttctcatttaaaagatatgtacacaattaaatgcgttgtgacttcaatgaggtatgtagaaacagagttatatataaacatatatttcatctttttccttttcaatgcctgaaggggaaaaaaaccttcacatcaaaccactcccttctgaagtattcaaaaaaaaaaaagcttttctttagagaagggaggtggggaggaagagactagtaaagaaaataaaaaaaattaaatctagttggactagtatctaactagttaacctttaacaatttatgctgatgtcagactgagcatgagtactgattaatgccccccctcaaatattttttataaggggggagttagtcacagcagccatttttgttttatgcagaaatccttcatgcccccccaacacacacacacacacacacacacttcagtacacaaggaaaatatctctattaatctgtgcactaatcagttatgaaaaaggagaaatttgtgggtttctgggtaaaggcttggagatgggggtgtaacagggaggagaatgggggggtgaaaaatgaaatattaagccagccattttgtttgaaaaggggattttcccccctctccctttctttatggagggggtggcggtgctggagggggggttgttttaaaaataatttcaaggcggccatcttagtgcctcagctctgagaaatatttctgagcgcccccctcagaatttaaatatatttaaagcaacggagaggggggcagagagaagtcgaaaacttttatatatatacatatatatatatatatatatgtatatatatatatattttaaatccccctttcttgttctcttgggaggaaagagagaaggaaaaaaagtctttcctcaattttttccaagacaatttttgggggtggtttggcccccctcctcagacggcggccccgagggtgggggtttcggaggggggtggcccgggggtttggggggctgggggaggcggtgaggaggaggaggacgccgccgccgaggaggaggaggaggaggaggaggaggaggaggaggaggtggtggtggtagcggtgggggaggcgggcgggcggtgggtgggggggtggtgggggggccagagccacaggatggcttcccctctgagggacgaggaggaggaggaggaggagatggtggtgtcggaggaggaagaagaggaggaagaagagggcgacgaggaggaggaggaggaggtggaggcggccgacgaggacgatgaggaggacgacgacgagggagtactcgggcgcgggccgggccacgaccggggccgcgaccgccacagcccccccggctgccacctcttcccgccgccgccgccgccgccgccaccgctgcccccgccgccgccgcccccgccgccaggtaagcgcccgccccgactccccccccaagcccgagtgggagccgcgggcgcgcgaagccgggcgggggcgaggcacccaccgcgcggccgagccgaggcgaatccggagcgcgaatccggggctcgggcccgtggccccgcggcggtccgggaggtcggggcgggcggtggcggctgcgaccgcggggccaggcctcctcccctcccccgccgcacccctcccccgccgccgccgccgccgccgccgccgccgccgccgccaccccggctggagagcgctgggcgcgagctgcgcgcgcggaccgggccactcggtcgcggctttcgggggaggaggaggaggaggttttttttttaccctcggcggggagggggtaggcaggaaacggccaaggcgaagccagggccccctccctggccgagcgagggaccgccgagaccctggcggccggacggcggcgtgggggaggggcacgtgggggaggggcggccgcgcgagcgcccctcgggctctggccccggtggggttggaccgagggagagtggggtttccccgcacggagcagccgacgggcctgccccctccgctcaggacttggacaggcagagtggggacggtgtccatcggacccccctccacccgcggagacttaggtgcccgccaactgaggggcatgcggtggcacgcgagggaggggtcttgtgaatgtttgtgggctgctgatgagtaggggcaggtggtggccacagtccacgcagaccacttcctggaataaggcaggagctcgtcccctcgctcccccagcctgtgcagggacagcagtccattcggattggggagcggagagaagagtgtctggggaaccagatacccccggctccacccccttcatctcgccggggctctgggctcttttgtgtcaagtgcggtggggggggtccccctcttgaccccgtcagtctggggtggccaagctgcccagctgtgactctcacgtggctgccattcactgtcactcactctctcgctgaaaccacccactccctgagcacgttggggggcgtgaactgcccacccagctgttctgcagcttgaccatcactcagcacccgtcccccgaggtgacaagtcacccggcggcactctctgggcggcgctctccagaccgctgcgccgcgtcaggcgcccagcggtgtccccctcagaccaccctcctagtggagtgatttctagtcttctttgggataggtgagcatctgggtgtccacaccccctgcttggggaacagcagggggacctccgcacccccgggcctctggctgccatgcggcacaaatgcaccaaacttcaaaacggccaactccgggctctttgtaaaactgtcatattgatccgtgtggcttctgtggcaaacgttcctgtctagccgagacgacctttgggggagcggggggtgctttcttgtgggtcggggagggatgtgtgtctcctggaaactggataaagtctccccgccccccaagcttgtctgaaaaagggtaaagttttgaaaaagttctcccagagagccccctgccttggcaggaggaggaggaatgaggagttgtggggagagggtgcctttggggttgcctccggcagaggcgctgaaaagagggaaagaaaggccgtcaggtcctgccaggggcttggcagcgctcacctatttgtattgggacttggagtctggggtggggtggtgtgggtcccggatctgggtacgttggggagagaagcgtgaaaggatccgaggttgagatgggtctttgtgtcaacccggcctcccctttccctcttggctttctgaatagaccagaagagacgtcagaggctgcttacattttacaactgaaatgaaaacccacctcccctctccccctgggcaatttttatctccctttcagccctccaagtcgaatgagtgacccagatacaccccctcagatgactttcggaggtaaaacttcgggaaattatttttagcacactcattatttctgtctacctaagtgtggggaaaagaaccctcctctaaggaaatttgttcaggctgccctcgctcttccttgtctagagtatgcatttgtgcacaggagagatttccattgttttccattccgactgctttgattctcaccattttgttttacattcttactcaagaccaattttatcccttccccctctctccagtctccttacattgttaaacgtttaaaataatagcagtcgtgttggtgggggaagggagcaggaagccaaaaactcatttcttctccctcccccttctggcaagtcgagagaaataatataacataatatatagatgtgattccttgggggtgggggtggggaatgattgtgggtggtgcggaaaattctggtagtttctttgcaaaaggtctgaaaatacaaacccaccccctgcctgcagtacgcatgtgcagcagacctattatggtggtgcgttgtgggggagggaggggaatttgagaaaaaataaatatatgtgtgagagattgatggtgagattagaagaagagaggggcgggcgggaggcgaggcttcggccgagactcctcccgcttgctcgggcggccaggctccgccctgcgccctccggcccccgcctctctcctccctgcctccctgagatccgagccggggatgtgggagagtctgggctccaggccagcattgagtggctgctgagaccgaggttgggacttagatttgctttattacccttccttgcttttccttgccgttctcgctttgcctctcccgccaccgacgcctgcccaagttcgggaacctcccgctggggtggggagtagagtgaaccggcttgtgcaccacccctggctggtggtggccgaggccgtgtccctgaaccttagccagttggcctgcccttgccactgcctcggcagcctgcgtttccatgttcaagtcaaccgaagtccctggggccagggggagccggctgctggggcatggcgccttccttgctgacttcctattacagtccccattccgtttcacacccgggctctggcagccacccccctgcacacacgcacacagtcctagagtgtcttcctgcacaaggggacacaggatgctggagttagcaggaaaggtggcactgaaggaaggcgaggcagcgactctgaggcagtggaaacggaggcctctggtgttaattgtggctaattttccgttggctgttgagggaaggagaaaggattgtgtgtcctagagctaggggctgggccaagcccaggctttcccatcttgcatcggctgcctctctctgtactagacaggtctggctggttagtctagtgcttggtaggggagggacgtgaaccagagccccagggccccaggtctgtggggcatcctgtcttcctttatgtggggtaactctccgttccgttccccaagccttcacagagtgacaccttcacagataatggggtggggggcctggggtcctctggcagagacatctggggagaaagccagggacctatccctgctgaagcaggtacaggccatcctctggatttgtgggcctgagagtgtgtgtgggtgtgggtgcgcgcgtgcgcgcgcgtgcttttgagaaggcatatgctgggtgtgtctgtctgtgcctatatctttgtttgggtctcccatactgcgtatagatgaatgggtcaggatatctggaacaaaatatggaggtgaagggtgagatcgggaaacaaagggtatggccccctagttcccaaagggagcagggagatgggaatagaattgaaggtaggttttaggctacttgggaggaggaatatttaggtaattgtggagactttctcctgtgtgatgaaggcggcagacactgtgatcctgtgggcaagaagtaaaaatgaccagctgaggatttcttttcctccaggactgtgttggggtgacaggatgcctggtaattatccgaggaaatgtaaatagaggcctccctcttggcaaaaggatgtcagggccccagggtgttagtgtgagaacccaggtgtccacctttggctctccctccccagcatctggcttagggagctgccagcttgtgtctccccactccaagtgctggggtcaggccaggccagcagctgggcatggcttccccagttcctgggcaggatgccagctggcgaagtgagggggaaggcaggaggagccctggcggtgactgaaaggacctgccacagtcagagcccatggcctggagcctggtctcttgttagtaggaggggagggaggggagtggtttggctgctcttctcttctgacccctgacctcccattcagaaccagagcatcccagagtactcgaaacactttctgtttgcatccagtgaagggaggcagggcttggaggagttaatgcttcctagagagtgggaactgccgaggtggggaaggggcaagttgaggggcctcagaggctggaaacctagaggcttaggttttctgatgctttttgcttcaaagataaggatgacattcggctgctgccgtcagcattgggtgtgaagaagagaaaacgaggacccaagaagcagaaggagaacaagccaggaaaaccccgaaaacgcaagaagcgtgtaagtgtcaagaattcctaactctgtggcaaggctcaagagacccattctcagagacctacattttctctggtcctgattactggtgtgggggtggggttctgaagccagggaggcttgatcccccgggccccccacttccctgccactgttggcctgtatctcagggatctgggaccctaacttcattcactgcaacctagtgaagagcctcgttgtcagtgtgtcctcagcagcaaagagaagcagttgaaagcacaagctctggaagactgtatgaattcaagagtccagcattcctctgtctaggataccaggccgtttatttggctctctgtgccttagtttcctcatctgtaaaaagtagataaaggccggttgcagtggctcacgcctgtaatcccagcactttgggaggctgagccgggtagatcatttgaggtcaggagttcgcgacaagcctggccaatgtggtgaaactccgtctctactaaaaatacaaaaatcagccgggcgcggtggtacgtctgtaatcccagctacacaggaggctgaggcaggagaatcgcttgaacccgggaggtggaggttgcagtgagccgagatcacgtcagtgcactccagcatgggtgacagagcaagactccatctccaaaaaaaaaaaggagataaaaaattagttactatcacaggattgttgtgaagattaaaagaggtaagatatggtatgtgctgagaacagtttctggcaatggtagggatgaataaatgttatttttatttctttctcttaggacagtgaggaggaatttggttctgagcgagatgagtaccgggagaagtcagagagtgggggcagtgaatatggaaccggaccgggtcggaaacgaagaaggaagcaccgagaaaaaaaggagaagaagacaaagcggcggaaaaagggggagggagatggggggcaaaaggtgagtagaattagggaatgagagtgagaaatctgcattaaagacgggcatgaggaggggaggaatggagactggactggagaatggggcaagaagcaagaaagcccagggaagctagtgggtaggtagacaggcctgtgtgcggcctggaataggggctggaggagcacctacttcaccaaagcccctctcccgcagcaagtggaacagaagtcatcagcaactctgcttctgacctggggcctggaggatgtggagcatgtgttctctgaggaggattaccacacgctcaccaactacaaagccttcagccagttcatgaggtgcggtaagactggggaatcctcgctaattgacacttttaatttgagggaggtcctggaccccttggaatctgatgaaagctatgaaactgctctccagagaattcacggtgtatacacaccaaattctacacgtcatttcagggaactcctagactcataaggatccaagaaccccagttgagaactcttcactgaggggcgaggggtggaggggccatcatgattccagtgctgggttagagaactctttagcaacagaataaagtgaggacagaatatagtgagccctcccctgccccaacagctccatcttctgctctgtgacttctctctagactggacctgagagataccatcagtgttcctgaacttccttagctcacttagcaggtcctgtgccccttccttaggccctggtaataatggagggtccactgctggcagtgggacctgagcttcagtggctcctgaagaaaagtagagaatagtagagtagaaaatagcagagatgggccaggtgcagtggctcatgcctgtaatccaagcactttgggaggccaaggcaggtggatcgcctgaggtcaggagttcaggaccagcccatccaacatggtgaaaccccgtctctactaaatacaaaaaaattagctgggcgtggtggcacatgcctgtaatcccagctactcgggaggctaaggcaggagaatcgcttgaacccgggaggcaaaggttgtagtgagccgagatcacaccactgctatgctctagcctgggcaacaagcgaaactccgtctcaaaaaaaaaaaaagaaaaaatagtgccgatgtattttgttttggggagaaggcactttaacatatcagttcagtgctctggaggcagctgctgaggttcacatctggttacattttgggcaagtgactgaacttcttcaatcctcaatttcctcttctataaacggggaataataatatatacctcataggaatctgtgtgggtttggtgggataatgaatggaaagcacagtaccgtcagtgcctggctcctagggagcattcagtaactggtgactgtcattagtaacgttgtctcacctaccttactgctgaacttggggcttttctcagcaccatggatcacccgtgtccgcacaagagttgagcaccccaccccagagcagaaccagcatggtctgactctttcacactccgtcctacggaagcccatcttcagggcccatggaacttactagtaaaatgcagagaatcatagcaactcaagagtattattgtgaggacaagataaggtggaatgtatgtgaaagggttttatgaactgtaaagtagtatacaaaagtaaagcatttttgttgattttattttaaccttttatgcttttaagttttatttcgctgttttttatttcccctttttttttttttttttttgagatggaatctcactctgtcgccaggctggagtgtagtggcgcaatcttggctcactgcaacctctgcctcccaggttcaagcaatttttctgcctcagcctcccgagtagctgagactacaggtgcgcaccactacacccagctaatttttgtatttttagtagagacggggtttcgccatgttggccaggatggtctccatctcttgacctcgtgatcctcccaccttggcctcccaaagtactgggattacaggcgtgagccactgcgcccagcctatttccctttttttaaagacagggtctcattctgtcacccaggctgcactgcagtggtgtgatcatagctcactatatcctccaactcctgggctcaagccaccctcctgcctcagcctcaggtgctgccacacccagctaattatttttttttattttaattttttgtagagacaggatctcactttgttgcccaggcttatctcatagccctgggctcaagcaatcctcctgcttcagcctggaattacaggcatgagccaccgtgcctggcctgtatttcttttttaatgcttttttaaacctgttctttccccgctttttttaaacttctttttatttatttttttaaatggctgtttttcctaataggacatattctcaccacccaggaatcctagcatgtacatagatttaattgatgaggggagatggcagtgttcccagaccatctgtgaagggtccgagttttctgcttctatatttacaggcccctaattgctaagaagaatcctaagatcccaatgtctaagatgatgaccatccttggggccaaatggagagagttcagtgccaacaaccccttcaaggggtcagcagctgctgtggcggcggcagcggcagcagcagcagcagctgtagctgagcaggtgtcagctgctgtctcgtcggccacccccatagcaccctccggaccccccgcccttccaccaccccctgctgctgatatccagcccccacccatccgaagagccaaaaccaaagagggcaaaggtagggaactctcttccaacaactgtcatctcaccttccaaactgcatgtcttcacattagagtctggaactctcgccttcccagccctgattgctggaggagagatgctttccaggaagtggggcttagtgaaaccacagcccacagaggaatccagaggcccctgtgacctccataattccaggatgtcatgacctctcctttttcctcttctcaccccgactcctcattcaggtccaggccataagaggcggagtaagagcccccgagtgcctgatggacgcaagaagcttcggggaaagaaaatggcaccactcaaaataaaactagggcttctgggtggcaagaggaagaaaggaggctcggtgagtgacccgtccctgtctactaaacacctgggggccaaggatccagagacagggatccgtgagggccaaggatccagagacagggatccgtgagggatggcggaacaggaagccaaaggcctggggagggcgtagaatgaagtctgcctcactgacggccacggggctatgggcagtatgtttttcagagcgacgaaggtcctgaaccagaggctgaggaatcagacctggacagtggcagtgtccacagtgcctcaggccggcctgatggccctgtccgcaccaagaaactaaagagaggccggccaggaaggaagaagaagaagggtaaggagtgttgactgtgtgtgatcctgtcagtgggccgtcctctcattcttattttcaattttgacttctctcttcaacccttctccctctctctctccatctccccctgccctgcttccttatccctccaccggggtatatgacagtcctgggctgtcctgcagtggccggggaggaggaggttgatggctacgagacggatcaccaggattactgtgaggtgtgccagcagggtggggaaattattctgtgtgacacctgccctcgtgcctaccacctcgtctgccttgatcctgagcttgaccgggctccagagggcaaatggagctgccctcactgtgtgagtacctaatgccagcatctgatggccctgaggaacccacccatctctttcccccttggtttcacttaccctcttcctgcccccagatggctggacttcttagtaacagatgtccgagtgtctaggatcctaatgtattcctttctcccacaatcaacatttctgaaactggagtgtccttttccttagttcccaccagtcttctctgcacttctaggattcaggtgtcctgtctttgcctgtatcttccagtttcattccttaatttcttccatctgtctgtgtgtctatccttggccccctaggagaaggagggggtccagtgggaggccaaggaggaagaagaagaatacgaagaggagggagaggaagaaggggagaaggaggaggaggatgatcacatggagtactgccgcgtatgcaaggacggcggggagctcctgtgctgtgacgcgtgcatctcctcctaccacattcattgtctaaaccctcccctgcctgacattcccaatggtgaatggctgtgtccccgatgcacagtgagtggaaacatctcccctctgtatttactgtcaggcctgatcccttcccccatccctggggcccacatgtccagcttttcatttctctgcactcccccacccttgtgggacccctatcttctcatctaacaatgggttctttctgcctctttctttcctcctccttgtacgtgtccatcccaaagtgccccgtgctgaagggtcgagtgcagaagatcctacattggcggtggggggagccacctgtagcagtgccagcccctcaacaggcagatggaaatccagatgtcccacccccccgtcctcttcaaggcagatcagagcgagagttctttgtcaagtgggtaggactatcctactggcactgctcctgggccaaggagcttcaggtactaggaccttttctttccctctcccccatgacctcatttcctgccatcctctccctctcttactcctctgtttgttgggttcccatactctttgttttctctcatttcaggcctgtggccttcataccctacttgcttagtttccatatgtggttcttttggtctacagtcctctttctctcagtctccgttagcttccttccctcagatatagcatagcctttcctaacttcatgtccttccttatctgtctttttccatgttttataatattcctggctgggcatggtggctcacacctataatcctagcactttgggaggccaaggcaggaggattgcttgagaccagcctgggcaacatagtgaaaccccatctctgtttaaaaaaaaattctcggctgggtgtggtggctcacgcctgtaatcccagtactttgggaggccgaggtgggcggatcacctgaggtcaggagatcgagactatcctggctaacatggtgaaaccccatctctactaaaaatacaaaaaaattagctgggcgtggtggcaggcacctgtagtcccagctactcaggaggctgagacaggagaatggcgtgaacccgggaggcggagcttgcagtgagccaagatcgtgtccctgcacttcagcctgggcgacagagcgacactctatctcaaaaaaaaaaaaaaaaaaaaaaaaattctcaatgtttctaatcccattccctatctcttgcttgtaagagccccacccaggccttgtcttctgaaactgttgcatctgtttcattttatttattctccgtcttggctttgactcatttatctctaatccatcctttttctttttttttctatttttttttttttttagatggagtttcgctcttgttgcctaggctggagtgcagtggcacgatcttggcttactgcaacctctgcctcctgggttcaagcgattctcctgcctcagccactcaagtagctgggattacaggcatgcgccaccacgcttggctaattttgtatttttagtagagacggggtttctccatgttgatcaggctggtctcgaactcccaacctcaggtgatccacctgcctctgcctcccaaagtgctgggacgcgcctgttattctcttattgccccggctggagtgcagtggtgtgatcttggctcgctgcaacctccgcctcatgcattcaagcgattctcctgcctcagcctcctgagtatctgggattacaggcgtgcgccaccacacctggctaatttctgtatttttagtagagacggggtttcgccatgttggccaggctggtcttgaactcctgacctcaggtgatccacccgcctgagcctcctaaagcactgggattacaggcatgagccaccgtgcctgggccaatccatcctttttcatagctccctttccctgtcccattcctcctgccggcctcttcccggttccttgttgtcctctgtgagtgtcaggactatctctttcccttttttctgtgccctgctagctggaaatcttccatttggttatgtatcgaaactaccagcggaagaatgacatggatgagcccccacccctggactatggctccggcgaggatgatgggaagagcgacaagcgtaaagtgaaagacccgcactatgctgagatggaggagaagtactatcgttttggcatcaagccagagtggatgaccgtccaccgcatcatcaaccacaggtgaatcctcggtccctgggaagtcagacctggtatatgacattattcttaccatggtgatggccccatgttagtatttgctgattaaccaggtaattgatctaaccttgataacctctgctgtagctccagcctttctggccttgtttcctccaggggaacgggagaaaacaggaggaaaatccggccaggcagtgcctcttttgtcctttgcctcctgtcatctccagtggcataagacatagcacatgagtctggggatgagggcatgaaagcaaaacatgagagacataattcatccagaccagtgttttgaatgtttcttcttcatagtacttattactgcctaaacttaatggtatgtatttagttatttcaatgctgccttccccacgagactctgagttccatgaggaaaatacttagtgattaggtgaacaaatgataaggagggatctccaggaatgttttgtgatagctgatttttaggataccatcctgagaaggttaggctgctaggtcaactattccaatctcccttccagcagctcactgttgacggttgggtgacaaattttgtgtgtttgctgataattgcgtttctcaggccttctttctgtttgtgatctgtgcaatattttcctcctgctcctccccatggcctcctgccccacagtgtggataaaaaggggaattaccactatctagtaaaatggagggacttaccatatgaccagtccacgtgggaggaagatgaaatgaatatccctgaatacgaagaacataagcaaagctactggagacaccggtgagggaatgagcttgtggattcaagggattctgacgatgagggcatgaaagccaaaactccagcataaaatgagggtacagtagggcctgattcaacctggagttcagggcaatggccacctgagctgggttgtttgagataggcttgctaaagaggtagtgtaaggaacagaaacaagatctggctgagtagtggagaagaggatgttcaagagtggggagggctggctcttgaggtgaaatccaaagggcaagggtaaagagcctgggaaaaaggaaatatgggaaaatctaggtcatggacagtgggaagtaggtctggaatgggttcagaaaagaaagcgtaggactcccaaggatgaggcctcattcagacccactctttttccagagaactaattatgggggaagaccctgcccagccccgcaagtataagaagaagaagaaggagctacagggtgatgggcctcccagttctcccactaatgatgtgagtcctctcagttgtcatttcttgtttctggagtgatggtgatcgaagattttccaagggctactgatggaacttcccagagattcagtaacctctgtgaacagtagctcttccttcagcatccagtcttgccccaagagtggctaagaattttggcctgaaagggcaggagccactagagatagcccactggtggctctgtcaccagctggcccttccccatggtgctgctggatattgtcttaaggaatgagggggaggggctgaagactagatgtgagaacttttgtaaactcaggccatagtagagggaattgtaatccaacttggtatccatgccagggaggaagagactaagactggaggagccgccgactatttccttgagctttctgacttcttgtctctatagcctaccgtgaaatatgagactcagccacggtttatcacagccactggaggcaccctgcacatgtatcagttggaagggctgaactggctacgcttctcctgggcccagggcactgacaccattctagctgatgagatggggctaggcaagaccatacaaaccatcgtcttcctctactcactctacaaggaggtgctggattctaggaccttgaaggggaccgcctggactggggaagtggggagggggaagataaaggggtgtagctggcagaggactagggtatacggcctctagcctagacttatgctgcccccattcttgactcccagggccacacaaaaggtcccttcctggtgagtgccccactctctaccatcattaactgggagcgggagttccagatgtgggcacccaaattctatgtggtgacatacacgggtgacaaggacagccgggccatcattcgtgagaatgaattctcctttgaggacaatgccatcaaagggggcaagaaagcttttaagatgaaggtaagaccctctacctcatatcctctgagaccctcaaagctgtcacttctttttctcagccaggaattcagtttctctattcccctcctcacctttctcctcttcctccacctgtcctcctgtctctgcactaccatcctagagatatggcaggtactcccaggggcatacatggatctgtcggtactggaaatgtgggcagaggtttaggagccatggtctgtaatccctgcttggagaacagagtaatggctcctgttgggagccacagtcaggacaaggtgtctggttctggaggtgtaggtgcatggttgtcaggtggcagctgaatgggcaataattatgttggcagagggaggcacaggtgaagttccatgttctcctgacatcgtatgagctgatcaccattgatcaggcagcacttggttccatccgctgggcctgtcttgtggtagatgaggcccatcgactcaagaacaaccagtccaaggtgagtgaggtttccagacctaaaaaacttgaagttgtggacttcccacttgccttggtcctaaaaaacaacaaaaattctggggattttctgtagtctgggaggacgtccaggttggaagagggagagggccagagatttggggcctctgatcctgagtgaaatgggagctggggcagggaaaggctgatgctgtgggtcggtcacttgtcactaataagcccattttcctgccttgccttgccccatcttttagtttttcagggttctcaatggttacaagatagatcataagttgctgctgacaggaaccccattgcagaataatctggaggagctcttccatctcctgaacttcctcaccccagagagatttaagtaagtggttccctaagggtagttggcagagatgagaggtggagcagataaaatgagctggtagaggattaatctgaggtggtaagtctgagatcaggggcaaggaacttgccgacctgttaattttcttctcttctggctcttagcaacttggagggcttcctggaggagtttgctgacatatccaaagaggaccagatcaagaaactgcatgatttgctggggccacacatgctgcggagactcaaggcagatgtctttaagaacatgccagccaagacagagctcatcgttcgggtggagctaagccccatgcagaagtaagatgcaagacgagctgcctggagtagggcttggggattgatgggagcgttccaagtgcaatatcataattgcttcctttatttatgtttcttttacacccctttcctggcctttaggaaatactacaaatacatcctgactcgaaattttgaggccttgaattcacgaggtggtgggaaccaggtgtcgctgcttaatatcatgatggatcttaagaagtgctgcaaccatccatacctttttcccgtggctgctatggtagatacacagagcagggagctgatcgaacgcccattctcagaaaacatgggtggggagtagtggggaggtgggtattgagccacaggggtggagctgggctggaaggccacggactgggtgtctgagaacaggaggaattgggaacatgtggaagctggatccgggcatctggccttctaggtgtggcaagaatatgggggcatgtttccaactgaccccctcctcctcctctctcctcccttttcaggagtcccccaaactccccagtggggcttatgagggtggggcacttattaagtcgtctgggaagctcatgctgctccagaagatgctgcgaaagctgaaggagcaaggacaccgagtgctcatcttctcgcaggtgacctgtgcccttagctgtctttacatctgcttcctcttccctctcctcatcctccagactttaatttcttacggtcttcctgtggctgctctggtgtgacaaatgaggagattcctcctgtaagagtttttttttttttttttttttttgagacagagtttcgctcttattgcccaggctggagtgcagtggcacgatctcggctcactgcaacctctgcttcctgggttcaagtgattctcctgcctcagcctcccaagtagctgggattacaggcgtgcaccaccatgcctagctaatttttgtatttttagtagagacgggatttcaccatgttggtcaggatggtctccatcacctgacctcaggtgatctgcccgcctcggtctcccaaagtgctgggattactgtatagcaagttcattcttggcctctgatgcctgttcttaaggttgctggaagttgaggtccagctctagttccttttcagctgcatgagggaagggggagggtgagccatctgcctccttagggactggtattatttcttcatcttattggcaggtgagggtgaagggcacagaccctttggaaatgtgatgaaagctctgggtctactcaccagaaaactgcacatacaatgacacaattttgtacggattttcagggggttcctggatttccctgaaaccttttcatgggtctcagagaacctctgccttaggagaaacaatcttaaatcaagagagtgtgacaagagggccagacgtggtggctcacacctgtaatcccagcactttgggaggccgaggcaggaagatcacttgaggtcaggagtttcaagaccagcctggccaacatggtgaaaccctgtctctacttaaaatacaaaaattagctgggcgtggtggcgcacacctgtagtcccagctactagggaggctgaggcggtaggatcacttgaacccaggagtggaggttgcagtgagcagagatggcaccactgcactccagctagggcaacagaatgagactccatctcaaaaaaaaataaaaataaataaaaataagaaaagagagtgtgacaagaaggtggaataatgaggagcttaagacagggcaggggttcaggtgtaaagattagggttgagtttgtgtaaaggagtagttagaataagcaagcatcccaccacctcattattgcagactccatccttttctcttgctctagatgaccaaaatgttagacttgcttgaggacttcttagactatgaaggctacaagtatgagcgcatcgatggtggtatcacgggtgccctgaggcaggaggccatcgatcggtttaatggtgagggagatacactggtccctggtgggtgtgggaggcctgagaaacctgtgataggtccctgggatgggagggggactggcttgggggacattggaaacttaggctttgagttgggggcatggttgtttgtcatcagagaacatctaggagcaggtggacagaactaccgggtacaagaaaaacctgatccaactctcacctcctagctcctggggcccaacaattctgcttcctcctgtccacccgagctgggggcctgggcatcaatctggccactgctgacactgtcatcatctttgattctgactggaacccccataatgacatccaggtgggaactcgcatcctagaacccctgcaccatttagcaaggagatgtgggttcatggaggagggtgtcatgttccggggtcagaaataaatctcttctgggaggagagaaggcccttcttcagcagccttctttcctgaggcagctctatgggcagcttctccccggccactcccctgacccacccgccactttctcttgcccctgcaggcctttagccgggctcatcggattggccaggccaacaaagtgatgatttaccggtttgtgactcgcgcgtcagtggaagagcgaatcacacaagtggccaagagaaagatgatgctgacacacctggttgtgcggcctgggctgggctccaaggcaggctccatgtccaagcaggagcttgacgacattctcaaatttggcactgaagagctattcaaggatgaaaacgagggtgagaaccttttctgcagctctgtgaaagcaggcccctgctctctcaggagtacttatcagccccctggggagagaaaaacaactcttctctgcagcctttgaaggaaggagagccttcttttagtagcccttggaggaaggttggcctctttctttgcctgtagggttaaaacaaacaaaacaaaaacctttcaacattggctcccggggaaaaagccttctctagggctcctgtgaaaaggacgcagagtagaagctttcccatcagcctttctaaactttggaacccaaagttcccgtttgttttccctctcaccaggggagaacaaggaggaggacagcagtgtgattcattatgacaatgaggccatcgctcggctgttggaccggaaccaggatgcaactgaggacactgacgtgcagaacatgaatgagtatctcagctccttcaaggtggcacagtacgtcgtgcgggaagaagacaaggtgagaggctttgggggccagacattatctatcccaggccatctccaaaaggcagtatcctttactcagccttgaagtaggagggtctgtcccccttaaaacagtagtggacctcaaacaacttcttcgtctaataggtgagactggacttcagagagaaacgtaggcacagacagtactggtaaacacagaagggtaccttctgagacagtgcaggagaaacactgtcagagggattagaggagagatttagaaaacatgaggagagcacattgcaggtaagagatggcatggaacatgcgcaatgtccagaaaatgtatgcagagccacgaagctgcaggagtggggagaccggattgggctgacgcagcagagtagggatttccttgcagtggaaggattagcaaagaaggagacccccagtgttcattcattctgttgcccttcagattgaggaaattgagcgagagatcatcaagcaggaggagaatgtggaccctgactactgggagaagctgctgaggcatcactatgagcaacagcaggaagacctagcccggaatctaggcaagggcaagcgggttcgcaagcaagttaactacaatgatgctgctcaggaagaccaaggtgaggactgccccagatgcaggcagtaaaggggggaagtgatgatgagtagggacttgaaggctggagctatttagagggaaagagagaagcctagaagtcagagccttcctctgctaaaagggaaagacataaggtagagtcattaggaactacccagaggccaggtgggtttgcaggagatttaaactcttcggtggttgcacaggcatcctgtggacacccagggccattgcttagagtaggttttgcaggagaagcagaggggcccagagactgaaggtgggcggtgaatggagatggtgtaggatatgcggctcccaagtcagactttgggcagtgatctggtgttcccagaaggaccaaggccagaataaaggtagacaagtctcggcagggaggaatccagccagaaagggcctcagcatgggcatatcccgagagccctccctgaccactgggccctttccacccccacagacaaccagtcagagtactcggtgggttcagaggaggaggatgaagacttcgatgaacgtcctgaaggtggcatctgtgttcctgactctacctcacctcttcccgttttattttccagtttgctttaagcccactgtttttatacaagtaaaaaagtcttcgtgtgtgtgtggaaaaactcgattgcagatgagcagaaaggaagaaatattcatagtctctctgctagtaaacttcggtgtgtgtgaccacataggctagatccagaaaggccatatcattttccattcccactggtaatctgggcctttgtcagatatcagctgttaattttaaaatatgactggttcttttagacttagtgggttagtagttctgaagtgcttgggagagaattgggagcacctcaaacgtgacaggaatgttcctgtgttgtgtatcttgtgggaatggggtgctaaggaggactgaggcttagaggaggtggtggctcagctaactgatgtcatccccaccctcagggcgtagacagtcaaagaggcagctccggaatgagaaagataagccactgcctccactgctggcccgagtcgggggcaacattgaggtgagagctgggcccagtgttcctgagttctccaagagggcatgagggcaggaggttggaagttggtgcctggatcactgaaggtagaaaggacaagacctaagaaccctagacatttgtcgccattgcctccttgctcccaccctcaggtgctgggcttcaacacccgtcagcggaaggctttcctcaatgctgtgatgcgctgggggatgccaccacaggatgccttcaccacacagtggctggtgcgggacctgaggggcaagactgagaaggagtttaagtgagtgtgggtgatacagggctgagttggacgcaaggggaagagctttgggtgttcctttcttccttggggccgccatatgatgtgaccttactcaactgattatcaccctccctgtcatacaatacttcctggctcgatttcctggggggtggtctcagcccactccacctcccctcagccgagcctagagtagaggggccaggcatcctccccaggggaggggcgttgaagcaaggagcctctcctgggctgtcctagcctcacatttacttgaccacaataacctggcaggaggagctggtggaaaggatgaagagctgactgatggggcccaggaattaagtaccaaggccaaagggaaagacccaggggtggggcgcagggggacagttaggacttggagggctggtaatggtgagagtgagaggcccaggggaggagccctggagcacctggggatttgggggtttgggggtcctcagtcatcctcgcgcctccctcactgccctataccccttctgtggctcccctaaccctcctcccactcccatgctccttagggcctatgtgtctttgttcatgcgccatctgtgtgagcctggggcagacggctctgaaacctttgccgatggggtccctcgggagggactgagtcgccagcaggtgttgacccgcattggagtcatgtctctcgtcaaaaagaaggtatcagtcttcctgtcacccaaagaatcaagctggctgcctagtctctgtccttcctctgcctctgtccctgagttgtaagcttgcgctggtgtgagacggaggagactggagcttcctgtctgtaagcgcctggagctgacacctaaccctcccaccctgccaccccaggtgcaggagtttgagcacatcaatgggcgttggtcaatgccggaactgatgcctgaccccagcgccgattctaagcgctcctccagagcctcctctcctaccaaaacgtctcccaccactcctgaggcttctgctaccaacagtccctgcacctctaaacctggtaatcagaagtcaggatggtgggagagacagaaagggagccaggagtcagggcgggagaatctctgtctttatcactgtgccttcccctgcagctactccagctccaagtgagaaaggagaaggcataaggacacctcttgagaaggaggaagctgaaaaccaggaggaaaagccagagaagaacagcagaattggggagaagatggagacagaggtgtgtggctccctggattcccctgtggagcgggaggggagggggcttggaggccaggtacctgggagccctctggctcatcctgaccccattgtcctcttccaggctgatgcccccagcccagccccatcacttggggagcggctggagccaaggaagattcctctagaggatgaggtgccaggggtgcctggagagatggagcctgaacctgggtaccgtggggacagagagaagtcaggtgggtgcatggccttaggagtgatgggggattagaatttgggatttccctcttctggggtcaggggatgagggtaacatcctcccttcctatcccctaccccctcccacagccacagagtcgacgccaggagaaaggggggaggagaagccgttggatggacaggaacacagggagaggccggagggggaaacaggggatttgggcaagagaggtaatgggtggaagggaccggacacctgggtcccagagggcatcaggggaggtggagtctggggaaccgaatgcttgggtcctgggcgggtagctgtttgaaaggccagtacagtacagtacagatagtagtcttgggacctgggaggagggtgtcctgaggtgtgagctttgacctgtctgtcctagcagaagatgtaaaaggtgaccgggagcttcgaccagggcctcgagatgagccacggtccaatgggcgacgagaggaaaagacagagaagccccggttcatgttcaatatcgccgatggtggcttcacaggttggggagactctcgctgctttctgctcctcaaggggatctgctcatcctcatggggtttctcgttttgcctgaggcttcctgctacctttaattccaagtaacttccaatgaagtatgttgcatgctgactccgatccttgctctaaatctttcttaagtatccctcttaactccaaagctggccctaatcccacctttattcttaattctaacgaacctggttagaactgagtttgttccaaacctaacctttacccattcctcttcaggagcccttagttccctttcattattcagtttctccatctctacctgtctgttggactgagtgcagtctgcaaaaccctgttacctcttctgtctgctgccttctttgcagagcttcacacactgtggcagaatgaggaacgggcagctatttcctcggggaaactcaatgagatctggcacagaagacatgactattggcttctggctgggattgtcctgtatcctttgatacacatgcaagaaggaaaaggttctctcaagctggcaaaaaaaaaaaagatgatttcacacccagggacagggctagtgccacactttggggagtcaagccaaaaggaagaagtgttcaaagccaagcccattcctgttaaattccttgatggttccttttccttcattggtagccatggctatgcacggtggcaggacatccagaatgatgctcaatttgccattatcaacgagccatttaaaactgaagccaataaggggaactttctggagatgaaaaataagttcctggcccggaggttcaaggtgggaatgagggaggaaaggagcgggttatagacgggcttgggtcagaagtgagaccagatctagttggaacctagggaaggttaacaccttcagggctgaggtgatacctggggccaagaccaaagtgtaaccttgtgcttgggagtgtgatctgggtcagggttgctgctaggttcgcagtcggtttggagctgggagtgccctgggccagcagtgagggcagggtgggtctcttgctatgtccgcccccccagcccctcacccactgctggcagagccctaccttcacctcccaactctgtgccctcagctcctggagcaggcgctggtgattgaggagcagctgcggcgggcggcctacctgaacctgtcgcaggagccggcgcaccccgccatggccctccacgcccgcttcgccgaggccgagtgcctggccgagagccaccagcacctctccaaggagtcgctggcggggaacaagccggccaacgccgtcctgcacaagggtaagggccgcggcggccccgcgcgggggagggcccacaacgctgcgtaagtcttcaccccgcacccctcaaaatcttcccaccccctgacccctctacctgctgaaccatccccctctgacctctaaccccactcctaccgacctggcacccccttggattttagcctctaggacttgtgcaagccaaccctcatccatgtctgatagcattcacatccgtgcccaatagagggacctgccccagcctctgtgtcccctccacacagtggggcctcttcactggcagtggaactgcatgcctgccatactgcttaacatcatccagttaggggccttggactgtgaatgcaccatacagatccctggctgtgatcaaacaaatcacattccctcacatgtgtttcaccccataaggcagaaactaccacccatccaaccctctggccttaccccatgaaacttccctttgaccttcgacctttcctcctaccccctctcaccttgccattgatagagattatatcccaaagccctctaaccatctaatcctgcctggtgtagtcactgactcctggcccctttgatccctgttctaattccttgaatctgtaatactgaccttctaacctccctctccccttacatattaaaaccgtgattccttaaagctttgacacttaccacctcccatgcctcctgactatttcctccccatcatccccaaccccaaaccttgctcttccagtatgagatgttctgacaactccccgcccccatgtcttccaatgtccccccatcttcctttcctccatgctccctttttctttcttctttctctccatctgtcttctgtggtaatctggtctctctgtctcttttcctgacactttttcttttcccctgagttgcttctgttttccatctacttcttttactttcttgatctctggttctttgacatctgtgttctcctctctcgctctttttctgcctgtatctgtccatctgatgcctctcttttcctggctccatctctgtatttccctgtctttctcttgcccttctttctctgtggcccgggccccagttctgaaccagctggaggagttgctgagcgacatgaaggcggacgtgacccgcctgccagccacgctgtcccgaataccccccatcgcagcccgccttcagatgtccgagcgcagcatcctcagccggctggccagcaagggcacggagcctcaccccacaccggtaaccctctttccccctagctccagttttccctgtttgtgttcctcctgcacacatacaaacacttccatcagaatcctatacaatatggaaaaacaacttgctagaacacagtcatcacccttgagtgagtctccctgcctgtgtatcctacccttagcagttgtggagtgtggctcataatgtctctcctacagcttctttcctctcacagactatgaactaactccaacttctgcttcctctctgttccaggcctacccgccgggtccctacgctacacctccggggtacggggcggccttcagcgccgcacccgtaggggccctggccgccgcaggcgccaattacagccagatgcctgcagggtccttcatcacaggtcagctggtgttttcctaccccctgctactcacactcctcctttgccaaactttatttctgctcagctgccctttaactgctctagtccatctcatttccttggtggtatccggtgttttatgggatagagttgttctaggctgtccccccacccatccctttcttaacccctcttcagtcccctttattaaaaaccagagttttagtagatctgtggcttggtgtcttctacccgagccacctccctccgggttccttcaagggaaagtgaatatgaaacccgaggggttagagagtgggaacatgtgttcaatcatgtagcacaaagtggaatctcagggaaaggggtttgcccgggtcttccctccctcacgtgggacaacgggaagtggcaggaggtgacctagaagtgagaattcaccattgtcatgaagtgacgtttgagagtgatctggagattgatctttccttacccctttcccaaacagccgccaccaacggccctccagtgcttgtgaagaaggagaaggaaatggtgggggcattggtgtcagacgggctggatcggaaggagccccgagccggggaggtgatctgtatagacgactgactggatcccaggcctgcccttcacccaggccccgtccccgaggccgacccccagctcaagcgctggggcctgctgccagccctccaccttccccaccccttgggccatcactgggctaggaacccctttgcccctctctgcagctcctctcttcaagaagggccctttgtctttctccactcccacacacctttcccaccaagccttgaagactgtgctggtgagaagaagtctgggtgggagatggctggcagggtcttccaagtaccttcctcccacactgccaagtatacacaacttcccagtaaatggttgtggggaggaaagaggtggagcctccccagccgtttccctgcagaatcagctctgtctcatgtggaagtggagaatcagccttgcctggcctttaggaacttttgtggggaagagagctttgaagagaggagggggactttagagagggatgaaaatgagccctgggagggaggaagggacgaggaggggtggctgcatgttaccgtcccctacctctccccacgtggagggtggagcagttatgagggaggaagtcaactgctgttcagcctcagaataaaggtgccgttcactggctcagttacctcctgtgtaccggcatcttgtgttgggaatgttcccccctccctagggaccaaggaccacccctacaaaaagagtaatggttgggtgatactccctcaagccaaagaggagctccccaacctgttctagggacccaggtaacctagaagggtgggagagaatacaatgggccagatgtggtggaagcccagctctggggctcaggttcctggaagacttctactaccctccctcctcaaggcctggatacagactaaatttgtataagtcaggcaggggacctagtcagggtcttgggagctaccttgtcgttgggaccagagcaaaatagtggagggcaggctagggaaatgtgggcacatcccccctcccaggaggggccggggagagtggcagtttgcatggcgaaccccccacttcctctttgctgccccttcactttcttgctgcccctttcccagtctctcttcacacccactcctggtctgtcctgatcccctcttctgtatcaggtttattggttgtacatataaattatactttcctttctgtgtgctctgttattttttatggggggggggagtttttggggggagggataagaaaggttgttgctttctgccttttctttttaaaaaaatcctacaactttttccttttcctcatttttatctcttagattattcactaaaactgaggttcttccagccccagctatgtcatggcctctgtagagaaggagggtgagcagcagatacctacgtagcctcaggttgacttcagagagagtgggacttactggacagaaatgtagtgggaggagcgcctatcaagattcaaaactgccttccagccatccttttgatcatcctttccaccttcaagttgcttagttcccctaagagtcagtagaggtcactacagctccacaggttcagctccagtatgaagcaaaggcacactttttttttttttttttttaaggcgttgagggtcagatctgtctagcttaccaaagatttgaactgctaggcacttccttgatgtttattgttcactaaacagagcctctgagagattgagagaggccagacacttagttcacaaggctattatattaaaaaataagagataaagccaacaaatatttattgagtacatactatacagtaacactgctgttggccctggagataaaacagtcacaggtcagcccttgctcccatagggcttacactccagtggggacacccacaaagcatgaaaataaaagcagtaaaaataaaacagggcattatgttacagaggggtgggggaaaaggctctactatgttgaaggcagaaaaaggcctcccaaaagagggagcatttaagctgagatgtaaggacaggaaaatgccaaaatagggttacaaaaattgaggtttatacccccataagtgtataattatgatttgtcaatcaaaaatatttatattttaaaaagattggaggcctctaaaaaattgaggttaataataagttcacatttttaactaagagaaaaatgttacatagtaggttaggatttctttagcaatagaatgttactttagaactttggggccgggcgtggtggctcacgcctgtaatcctagcactttgggaggccgaggcaggcggatcatgaggtcaggagatcgagaccatcctggctaacacggtgaaaccccatctctactaaaaatacaaaaaaattagccaggcgtggtggtgggtgcctgtagccccagctacttgggaggctgaggcaggagaatggcgtgaacccaggaggcagagcttgcagtgagccgagatcacgccactgcactccagtctgggcaacagagcaagactccatctcaaaaaaaaaaaaaaagaactttggataaaataatctatcagtcatacctattatgctttaaatattctacctacagatggtgatatcctaaagagtgtaggatctagaccaatggtacttaaattttcacatgcacacacatcacctgggattgttaaaatgccagagtctggcccggcgcggtggctcactcctataatcccagcactttgggaggccaaggtgggcgccatcacctgaggtcaggagttttgagaccagcctgacaaacatggcgaaaccccatctctactaaaaatacaaaaattagccaggtgtggtggcaggcgcctgtaatcccagctactccggaggatgaggcaggagaatcgcttgaacctgggaggcggaggctgcagtgagccgagatcacgccactgcactccagcctgggcgacacagtgagactctggctcaaaacaaaaacaaaaaaacaaaaaaccctgccagagtctgattcaggaagtctggagtgggatcctagagtgagactgtgcacttccgttgacagtacaccaacactgctggtccttgactatgactttatggtcataagatacaggattctaaaatagaatacatggcatatatacaacaggtgatgtcccattatgggacacaaattttaaagacacttaaaattgtataagtatcttttcagtagcgctagtgtgttcccgtgactgtaaagataacacagataatagcaaaagtttgaaatatgatgcctttcaaatggctctcccttcctactttgataggctctaattaggtgcctcacataaatgccctttggaatttctgatacctgccctagcaggttgaagggagattctgaaatgaagcaaggctcctaatcatagtcacaggcagggagccatctcaatttctggaacacagaactgggagtggggagacagcaggcataccagcacccttacatgccagagaagtgagattaacatgacgcgaaaattagcctcttctctcccgttccatcttaaaaaaaaaaaaaattcaaaccattgacaaagaattgctaaaatgggacctgttgctcccacacaccagagccaccctggacaaaagccaacgtcccagctaagaaaacagtctgtcttcttcccacggtaacgtaggctttgtttatatcatcccttggccactccatcctgaaaatgtaagactggcacagtcagtagatgggggcgagttcgtctaggagcctccccaactcagcatcaacacctcccagggcgttccctcctgccttcggctcatctctctcatcacatgccaatcctgggatctgagagagagtagtcttgacatcagcccccgcgaggctgcagctcccaccttccttcggctgtagcttccgagttcctcggttacaacgtgcaacgggtcaggtggccaatgtccttgatctccgcacagtagagcactgggggaaagaagaagggttagtggcagcaggagcatgccaacgaacctcggtattcctcggcgctctctcccctgcatcctccccgggcagcccctcaccgttgctaggcagcggacgccgccagcgccgcgcaggccccaggaccctgtcccagagccgccggagcgcgcgccacccagcactcctaggccccgcccccttctcgctctccccttcttcctccgcctctccgtcagcgtcgctgctttccttggccgggttcccagcctcatctcgttcgcacttggcccgcgctttttcctccaatcgcgaccacaagtccgagtcaagagccatctccgtgaggccgccgcgagggagctgcgagggcgcgcggcagaaggggcacgtgaccacgcggcgcaggcgcaccacgcgcgcggccgccccgccgccgtccccgcgcgccgccagctcgcggaggcaggcggtgcagatcgtgtggccgcagcgggcgcgcgccgttccgggcaggcggcggggcgcgcggcacccgaggttgaaaggacggtagcagatgttgcagtccagctcgccccgctccggaagagagggtaccctcaccaagagctgcatcgtgcccgccgcggactcgaggacgtcgctaacgcggccagctccgtgaacagaacgagcacactctcctggggccgggtcgggtcctggggccggcgccgcggcctctttcccctttaaataggggaataagtgaggccccacccttcggagcgtcacgccttgatcgggccgctccctgtggcggcacgtgtgggggcggtggaggcttgaggccgggaatgacagcaatgatggagtcggggaggcggcccaggccatgccaggaccggagccctgggggccaaagcacccattcctccctactcccgggggagcggggtggggctttccttcttcccccaacgcaacgccagcgctccttaattctaccatgtacaaagccccgggtctctctctgcgcctgagccctcagtcactggcacaagtctctaaagccccctccgcctattcagttgctcgcagttagtttcacaatcccacccagtttccaaacacggcccgttctgcccaacctttagtggtccctgggcctttgaatcgattttgccctcaattctcattatagatgacctctctgtgttgtttgtaaggctggcttcctaaacttcattctccccaaactgcttaactctcagctggtatctcagcctaaggagggacctagatgccaggaccatggctttaggaatgctgggaatcctttccttccggaggcctggacacccacacatcgtgatggccccagcaaagctccccagcataagttctgactcaggggtctgacttctcccactggtaaacaggacatggtactcacaacccacattcccctcatggtgccacacccacacacagctgcctcctcaccctcctctcctggacctgcagcccaggttctgttatggagggtgataacacagtctagagccagctggcttgagttcagatcctagcttccacctcttactagttgtgacactttgagcaagttacttaatttctctgggccttggtttcctagttttaaaaatgtggataataataatgaggactgaatgaacttatatgtgtaaggtgcttcaaatggtgtccagtacacagtaaaacaccaggtaagtactatattagctactattgttatcctgtgcccccagcctatactgaattcacattaacttctgagtacccaacattttcttttttttcttttttttttttttttgagacggagtcttgctgggttgcccaggctggagtgcagtggcaccatctcggctcactgcaagctccgcctcccgggttcatgccattctcctgcctcagcctcccgagtagctgggactacaggcgcccaccaccacgcccagctaattttttgtatttttagtagagacggggtttcaatgtgttagccaggatggtctcgatctcctgacctggtgatccgcccgcctcggcctctcaaagtgctgggattacaggcgtgagccaccgcgcccggccagtacccaacattttcaacacccatccatcttgaccaatatgtgcatgatgagcttctccacacccatggcatttaccagctatcacaggcaatgcaaagctggtttttaaacctaaattgttaaaacctagagggtaatctcttttgaggaggtataccatcatttttaagcaaacatttcagaacttttgaatggtattgtctgtgatcatgggagaagctgtctacttattacagtgatgctgtcacaattcaaaactttttggtcttaaaaaaggactggtagggccaggcatggtggctcttgcctgtaatcccagcattttgggaggccgaggtgggtggatcacttgaggtcaggagttcaagaccagcctggccaaatggtgaaaccccatctctactaaaaatacaaaaattagccgggggtggtggctcacacctgtagtcccagctatttgggaggctgaggcacgagaattgcttgaacctgggaggtggaggttgcagtgagccgagatcacgccactgcactccagactgagcaacagaatgagactcggtctcaaaaaaaaaaaaaaaagggggaactggtaggtatctattgttaataaatacatgatgggccgagtgtggtggcttacgcctgtaatcccagcactttgggaggcagagacgggcagattgcctaagcttaggagttcacgaccagcctgggcaacacagggaaaccctgtctctactaaaatacaaaaaattagctgggcgtggcggcgtgcacctgtagtcccagctactcaggaggctgaggtgggagaattgcttgaacccaggagacagagattgcagtgagctgagatcgtgccagtgtactgcagcctgggcgacagggtgagactctatctcaaaaaaaaaaaaaaaagcttttaatgtggtggtagattaatggtggccccaaattcctttgcaatgtgactttgctgcatctcacatcaagaattggggtctctttctctatcccttgaatctgggctggtcttgtaactagttttgaccaatagatgtggcagaagtgatgtgtgagttctggaacctagtccttcagaggccttgtagcttctgcttttgtccccttggaacactccctgagaccaccatgtgaggatgaggccacacggaggagcgccagccaacaaccagacatgctggtgaggccattttgcattttcctgcttggctcacctgccatttgagtgcagccacgtgagtgagcctaggtgaaaacagcaaaggaactcccagcaagcccatagaatcgtgaaaaagaacagtttttaaaagttatttctactgagtgtggtggctcacacctgtaatcctagcactatgggaggccaagatggaaggataacttgagctcgggaatttgagatcagcctgggaatcgtggtgagaccccatcattacaaaaaaaaagaaaaaagccaggctcagtggtgcacatcgtcccagctactcagtaggctgaggtgggaggatcacttgagcctcaggacttcgaagctgcactgagccgtgatcatgtcagtgcactccagcctgggtgacagagcgagacccccgcctcttaaaaataaataaaaagtggctgggcgcggtggctcacgcctgtaatcccagcactttgggaggctgaggcaggcagatcacaagatcaggagatcaagaccctcctggacaacaaggtgaaatcccgtctctactaaaaaaacaaaaattagctgggcgtggtggcacgtatctgtaatcccagctactggggaggctgaggcaggagaatcgcttgaactagggagtcggaggttgcagtgagccaagatcgccactgcactccagtctggcgacagagcgagactccatctctaaataaataaataaataaataaataaataaatagtggctgggtgtggtggctcacgcctgtaatcccagcactttgggaggccgaggcaggtggatcaccaggagttcaagaccagcctggccaagatggtgaaaccctgtctctactaaaaatacaaaaaattagttgagcatggtggcactcgcctgtagtcccagctactcaggagggtgaggcaggagaatcgcttgaacccgggagagggaggttgcaatgagctgagatcatgcaactgtactccagcctgagtgacagagcgagactccatctcaaataaaataaaataaaaataaataaaaagttatctcaggccattaactttggtggtgatttgttgtgtatcaatagataacggatatagagggtttcctactgtttttttttccctgtatgataaatatattttttgagacaggagcttgctctgagcatcaggctggagtgtagtggcataatcttggctcactacagccttgatctcccagactcaagccacctacctacctcaggctccgagtagctgggactacacaggtatgagctaccatgctcagctaattcttgtatttttgtagagatggggtctccccatgttgtccaggctggtcttgaacccctgggctcaagtgatcccacctgccttggcctcccaaagtgcttggattacaggtgtgagccactgcgcccagcctagataaatataacattgtaatgtgccctgtaagtccctgtgtgttctgaacttaccccttccttccttccttccttccagacagagtcttgctccgtcgcccaggctggaatgcagtggtgcaatctcagctcattgcaacctctgcctcctgggctcaagtgattctcctgcctcagccttctgagtagctgggactacaggtgggtgtcaccatgcctggctaatttttatttttatttttattttttatttttagtagagataggttttcgccatgttggccaggctggtctcaaactcctgacctcaagtgatccaccagcctcagcctcccaaagtactgggattacaggcgtgagccaccgcacccagccattacccatgtctcactttctgttctgttcctctctagacactctggctttgggtacttttggcttgtatgttcttttctgccacaggccttagcatatgctcttaaccctcttgcttaacccttattaacacctattcatgcttcagctctcagcgtaacctcaccatgtcaaataaccactacagactcagtaataccatgtgctttcctctggactttggacaagaagtttgtatttatttggtggttctgtgattgtctctctcctcagcaagatatatgaaggttctgagtctggttttgttcacccttgtatccctgtgctataccataataggactcaatagacaaatacttgctaaattaatgaatgaggtgggtgataaatatggcaaatgtccatatacaaaggaggcgtgacaataaaggaaggcttttttttttgtttttttttttttaaatcaaggcgtttccaaactctctctgaaggtaattctaggaggaatggtgtttgtttgtttttaatattttgagcaatgggacaggttcattaaaataagtgtataaccctctaagataactatttaaggagaatcctatttgggattgataaattctcgtatgttacagaataactaatcatagtttagtaatatattttacttctttgtttcctccacagtcttgcaaaatgagtgggagatgatggggtggatttaagtattaattagttgatgcagttggctgctaatccagtaaatggcatgctgctgacttttctcttttggaaattggttttactttgcttgcccagcttttggatcaaggcgggatgaggacgggtagaagggagatgggcaggttgtatttaaggaaggcagagctcatcctcctctaccttgtgatctttaaggttgtaactttccacccaattctgttccagtgaaatgataacatctttccttctctctgtattccctcaacctcagaccattcttcactttacctctccaccaaatcacaaagcctcaacctcagaacagcatctccccctcagccacaggttccttggcatatgtgtgggtgtccagcgagagagaaatgagaagtacaaggaacaagtatggctaatattactttaaatacaaacaaataaaggcagatagctaagtctttcatagaaagaggaggaacaaaattatgaagccagatttctgggttctaaggaatgtggtagctgaaggaagaaaactggggcctggggtatctggtgtcttggtccttgatgagaacagtgactaggagcccgatgcctgggtcaccaaggtgaatgagcaatggagagaaagctaatgctagcagatttctaatgttagggggcgagagggccagacaagtgagactgtgaccctaacctcccaagcccctgcaactttagacactgtgaggatcaagctgaggtttatttacagttacctgggaagtcttacagagaaggggccatcattattgctttaggtttattgccaggaggaagactgcagttccccactgccaggtaggaggccctgctcaaggctcaaaagtctatacccagacgttttatttatttattttttttaaatcaaggcgtccctgcccgtgacggaaaggctgtcactaattcctgccaagaacagcccaactgttttccaaggaccaccccggccactttcaccagactgcagcgtagatgtgctattacatttccctctacctttgtcagtgctgtgccactgtagaccccaccctgaccgccctcctccacctctgggctgggaggcagggtcctggtttcccaaagattatcatttacttcctgccaggaccagcctggcttccttcgtaccgaatacgctaagagccccatttcctatgttccagatgacatcacaactcactcactaggttattaccctttgatgacatttcaagggccccttttgaggtacactgtatgtttcttgtatgtgctgggtttttgtttttgttttcttttctgggcctcgggaataaggggaggagagtagggagcgagacgaagtggcagagagccgacggcgagtagctcatgcccgggatttgcaagaagggcctagaaagacgcagcagggggcgggcgtgctactttctctctcgaccccactgcaaaaggatatggctttgttcatgcgtatcactactcgaagccgggactcgttggtgggcggggctagtctggctccggccgctgcgtggagggatccggagcgggagaggcggctgcgaggagcggggctcgggcgggtgcagcgacaccgggttgggtccctgcgcccgcgacagactacttcttggaatgcggcttgtttcccaggagcccgtctatttccatcactgtctgcggggtcagctggctcagcacctggaggagagtgggacggtggcgacggcagcccatgctgggtcactgagaaagggcatggggttccagtagccggggaagcaccacagtggggtcaagtggcaaggcaagagccgcagctgtgccggtgcctcgctttccggccctgggacctctcacctgcaaagtgaggactttgtagtgggtgacctgatagagccatcctgggttggatagcgtggctttgactcctggggagggggacagataggctctgcctctgagtccccggctcacctgtagcgcgcccaggtgttctatcaactgctccgcactcgacacccccagcaagacagagctgacaccctcactgcggagacaccacgctggggccagaggaggaaaaaaagaggactgatggggaacagtgaccacatagatttcagaagtgtctctgaagacaagcgtcctccctagggacaaaccagttttaggatgggcttgggagcatgtcaggaggagacagggcccctgcagggtgcaatgtctcaccaatagcaagctgggccacggtgcagcccagctggtgagcgacaggaagaaggtccatgactttggcttgttgcttcttgccatcttcactctgcactttgtccttgagccactggtagccctggaggccaagaagaatcaacagaagaccccgccatcaccaccaccaccaccacactcacaaagcagccccccgtaactccccccaaagcagcccatatagcccagtcctgccatcgagagcccccagatctcaccttgatggaggccctgcaagtatctgggactcgcccatcatacttgctagtaatgagaccacaggctagagggtaccaagtgactgatccaactcctaagggaagaacactgggtgtcaggaaaaggacctagccatggatgaggctaaggtaaaggcagggatgagggctgcaaaccaatcttgtggtagagctctggcagctgcatctccaccttctccctctgaaacagatggtgctccgcttgttcacacactggaggaatcagattgaactgtctggccatggagtaggcctcctgggttggggttggggaaaagaaagtggtcagagcactacttccgttttcttctctgccttctcccccagtgcagtgggctttggagtaaccacgtgaaaagtgggaaccagttgtgggacaggggcaaggtggggtcacacactcaccatgatttctgcagccccccatcgggatgtcccccagtatagggccaggccctggttgatgacataggtcatggctcgcacaatctctaggtacacaggagagggaaagccttactgtcagagccctggaatctaagactccagatttgcagacctccacctgccccaccaaggccccaggcaactctatggagtcatgaaagttaatatctactctttgcctctcttcctgtccacatcctggagtctcagcctccactgtggagttttggaggccttctgagcaggggctggcttcctgctgagggtttgaggaagtgctcaatttttgtattttagattttttgagacagggtctcactctgtcactcaggatgtagttcagtggtgcaatcatagctcactgtggcctcaaactcctgggcttgaatgatcctcctgcctcagcctcctgaacagctgggagtacaaggcacacaccaccacagccagctaattttaaaacattttttgtagagacagggtcttgctatgttgcccagactgttctcgaactccaggccccaagtgatcctcctgccttggcctcccaacgtcctgggattacaggaatgagccaccgcacccagcaaggaagtgctcagttttgaaggactgtaaggtttgggggtgctgcttttaccctccataggacagttggggtctgagcgattggcaaagacaatgtccacgtatcccagctggaggcgttccagggatcctcgcaagcctggaggtggggtagggagaagaaaataagcacctcagcttcagtgtactaagaatgcaggccaccaggcgtggtggctcatgcctgtaatcccagcactttgggaggccgaggtgggcggatcacctgaggtcaggagtttgagaccagcctggctaacgtggtgaaaccccatttctactaaaaatacaaaaaattagccaggcgtggtggcgtgtgcctgtaatcccagttactcgagacgctgaggtaggagaatcccttgaacccgggaggaggaggttgcagtgagccgagatcgtgccattacactccagcctggacaacaagagtgaaactccgtctcaaaaaaaaaaaaaaaaaaaaaagaattcagaccttgcccccttgccatggccacctaaatccctattcaaagcctccagaagttcagagaatgttccctactcctctggcttccatatcccctcactttgggtttccagcccctaactctcaccctcaatgatgtgctttcggcttaaacctcgctcggtttctgccctgtaggaaaaggtaagtcaaagatgagatgtgacaaagataggggaccggggctggcttggagccataaggaaatgggattgcacgagtcttcacaggcatggtgcggacctggtgcaggatagctgtccccacccccaccccatacaccttcacacattctttgtaggccttctccacaatcgcagtggggcagccacttactgtcctccccaaaaaatcttggtagtgatgacatagcttgatctcctggaagaatagaaatgggagaaccagtaagaaaaggatttttgggtgatcacatccccagcaaccccccaaaacagtctcacctccaacctttgctcttgaggatgttccctagggttctttcagccctaaaagaaacataaggcagagccactgatcccttctaggccaatcaattccttcctctcctccccaccttttcctctcttgcaaagtaggatataaaccaggagtccatttcagctcacagccccatcctggacaaaataagaggtctgttggaaggaactaggggtgtagttgtatagttttcatcacatattcaacaaatatctgttgtgcattagctgtgtaccaagccctgctgtgggtgccaaaaagatagaataggatgaggggagaggggccaactatggtggagccaggaaggacactgccttgtctggcttcaactatctgggttgccctcctccttctttgagcctctgcaaaatcccacccgtcctccaaagctcagctcaaattctgcctcatccataatgtgttctctgagtgccacaatctatggtccagccttctggtcagcttccacagaattggctacataatttagcataaaattatgagctcacttatgacaagtcttaagttgtcatggtggactgttactgaaatgttttaccgttgtttaatctttcctattgccctttttttttcctttaaccacttagactgtgtgcactttcgcagacatgttgattcttcccagaagcagcacctgctctgtgccaggctctgtgtgggtacttggggaagagcaagacaagttccatggaaggaggcctctgacttgagcagctaatatagctgcataaaccacgaattgcgtgtcagaaggcagtccacagtgctttaggagctcatggtgggggagggggtgaccaactctggggagttgggcaaagttcttgaaggagcggacactcgggtcaagtcttgaagatgagcagaagtgtttgctagatggggaagaggcagggtaggtcatcctaggttttccctgctcctagtgtgaaacggcatgatgtgtttgaaaattcatctttgtagttgcacataactaatgcctcagatatatttgttgcctttatttaatgtagctgcacagtacgcccattgacttctaagccagagagggactaatgttgggactgtagctcctacagtgctttcgggtccctccgccaaaaggttggaacttcacgttctcagaagtcccagggttctttagagggaaaacgagaagataatccctggggtcctctcagccttccaaatggagcttagctctttcaccccagtccttactttcctgctgcgtacacttcggcggtgtcaaacaggtttacaccatgctcataggctacagtcagcacatcctctgctgtctagggaggtgaaagaggtaaagatcaactactgctcctcagttacctccctcactgtactctaacccatcacatctcagccctgggttctctagtctctcccctctccccatcctccagcctcagatccctcattccctgtgcttgttgtccaaacccctatccaggttcacttcccttttttcaagttccctcacccccaccaccctgattctaggtccgataacttatacctcatctgagatctgagaaccaaatgtgacccaggtacctgcaagagagaagccaggcacatgagaactgcagggggcagaccatgaaagaatgccctcctttccttaatccctattctgactcacctaggccaagacaggatacccgaagaccagacttccctaggttcctgcaagatacagaagcagcgggaaggggtggagcctccattatggacttagattatcagcccccagctcctctccttccagactgagaagccctcaggtgtctcagtccaaagaaattagacccagtgggcctataagattgggcaagtgctatctccagagcagaggtcctaggaattttctcaaaaggacaagtgaaccatatgtgactgttcctctggagccactgtccagagtctccattccctcttatcacattgaagacgtgcagtctggtttgtccttcttctggggtcttgtctgtgtttgagtcatctgtgggttgtgtgcagtgaggggctgggaggaattttgtttgattgtggtgagtttgtgagaccaggccctcaggcagagtgctgtgccaaatggtagatggcaggttggaagaggtaaaccaagtcaagttcaggcattcagacagacaggggtccctggctaggctaggcagatgggcctggaggaaaggcagattgaggacctggggggaggggggagagtaagacagaaaagcctagttctccctctccactccctctgttcctattgacttgtgaagactgtctctgaaccagtgagccccctcatcctcccaaagcccccaacccaggtgtcagctcagctttccaatcagggccaccatatagaggggatcagattcctcaggtgacaaagcaggtcagatcagtgacctcagctcactcccaagcaggagcccctcctctaccccctacttcaggttctgagcttctggtctggcagtcctctgagataaagtcagttacatttcagtctacccagaccctgtccctcagcatggagatgaaaaatgtggtccatccttcccaccggccccactccccttgcacccaagaaaggtcgcagaagacctagcctttggggcaggcaggggcagtatctgggtcaggcaccccgagcaggccagagtgagaagctgattccctccctccactccccaggacacggacccaaggacactccactggaggaggcatagcctggagatccgtgtagcgtggagatccatgcatccctgaccttcccaggggtaaggagggaagctcaggggcatcccctgggtctgacaggacccagtcaaccttggtaaacttgattctcgtagtcaggggtatcgacagaaaccaagagagggacaaagtgagggagtgccagagacagaaagaagagatggaaagaagggagacctacttagtgaagtttgaaggggtcttggcggccatctcaagcagtctcaggggtcccgaaaggaaagcggaaggggtgggctgcccggccacccccatacctgtatttcatgccagtgcctcggccggtgctctctcggagggccccagcgggcgctgggggtcggggaaccagtgcagctcgggccttggggccagaccctccaccccccggaggattcccgtgccccccgccggccggcccaccattaccgcccccggggcccggccggggtccacacagacggtcctcactgctccggctgcgaaggttctgctcggtacacgcgatagacacctgcatgctggctggccgaggcgggggagggggctccgaggggacgggaggggggagcagggaagcccgagggctgacgaccgggggcgtagtggggcgaaccccggcagagcgggaaggctgaggaggctgcggcgggagccgccaggcaggatcgggcccgcgggggcgggctgctggaggtcgcgaggtttgcggcgggagggaagaaacgtggggggcgccaggagtggagatattcagttacgggggacacaggagcaaggattaggagggggaaatggatgagggtaaaggtcgaggatgaggtaaaggtctcggaggataaggacccagggggaagcggggcgggagagagatgccacttcagcgcgaaccgctgcgggacccgctgggctcccagccgcgtcggcagcgggcccagctcatcagcatgcaggcaccgcctcctcatctgcatagagccgccctcctctcagccaaacctgccgctcatctgcataagccccgcctgctgaaggctctgcagcttgaatattttctgagcggaattggggaggatggctcctgcaccctctgggacccaagggctgtcaggcttcccccggcccagtgattctcaatcgggagggaatgtatctcccagcgtactttcggcaaggtttggagatatttttgatttcatgcctgtgctatcagcatctagtgggtggtggccagggatgctaaaatcctacaaagcacaggacggtccccacaataaagaattatccagctcaaagcatcaatattcccacggttgagaaacccatccgcaaagccacttcgtggccctccagggggtgtggctgccctactttccaccttcatgcgtggggcaggactgagagggccctcaaaccaacacgctcaggccgcagagagtgacaaaaagtttattctgtgcttctcgcagcattaggcaggggataaaactggagagagggcctggtgtggaggtggagggactctgtgggcttcactctggtaggaggagagcatcagggcaggcctttaggctgttgctctgggcagggggtgggggtgcgggggcttacagtgggggcccttagttggcacaggttcggaagggccccaggcagacatgaattctcctgagacttgaggtaggttgcttcagccagcccgggcggagaagaagggcagagagcgaacataggagtccagtcgggagcgaaagagctcactttgcacagtttggcccagcgggcacaggggattcttcaccaccagctccacatacagctatggaaagggaagatgttagagccaggctttggatacttctggtttttagccccaaaccttgtataacctcaggggtgtgtgaatgcacaaggaataagggctggaaggcaagccctctctgaggagaaagtggtggtgggagttaagaacctaagggcccctgagaaaactcttgagttgagcaaacatatagtaggattggggcaggggagatgagggagtcttggggttctgaagagctctgggggatgggtccctggggctggcactgaccgcactgtagatgtggtgcagcacatctcggatgggtcccacgcccaagtcagtattcatgacaactttgatcccagtgggcgtctcgtagtaatggagtttgtaacggctagtttggaaggccaggaagccatccttcctgcagagatgaggagggtgttaaagaatgggagcagaatctctcccaaagagacacttctgatccccgcaaacatcgactccctctttatctaaacatatcctttgtagaagcctggttgagtaaagacatcgcccatcgtcacccctcaatttagcccccaccaacttctctactttcagaccctccccacccccactcctgccagctccagcactctcgctccggactcagcctctcttaagtaccctttcccccctctggaggccaatgctccttccacttcagaaagtttcccccatccccaaattcccaaggctagccctcctcccaacatcttctctgactccgcgtacatgtctagcggggacatcttgctgacaaacgagcggatagagaagagcatcccgtacatcagcttatactcctggagggagaggggcagagttagctctcggttgatgcgggagatggggtggggggtgggaacgagctggggtttggagaggaggggctgggttgggactataggtgtttggagatgagaggtcgcccgggctgcaccggggccctctcgtcacctcctccttgggaatccctgcttgcttcttgcggtgccattcgctgtagtgcagacacactccattccggtcaaacaggtacaggttgtggacagtcatctgcagggcagggagtgtgagcctcgctccggggccgcccccactccttgggctcgggttcccggacccacagccttccaaccaggtggggaccccacccacggactcaccggaactgctccgagtgcccgtcaagagttacttccggtttccacggagctccgccccttaggggggttctcgctcggccgcggctgggcattaactccgctccagtgctgcttgtcagactccgcctccctccctcagccaatctgtggccaccggagccgcgcacgcgcggccaggcgctcgggatacagaagtgatgtgagtgtctgcgagcgtggtctcgcgggcgggtgacgtcatcgaggcgagagaggcggagccgtggacagtgggcgggaggctgccaacggttttgagcgtagggggaggcgtgagagggggatctcaggggaggaggtcaatcgcttgccccccactttggcaaattggggactgaggactggaagggtggagagtaggcggaaccaggtggtcgtcggggcagaggatctcgggctaggcttgagggcggcgtgcttcttagggacgacttagggcgtgactgagggttcacaaggtttcttttggggtggtcgggagggagagattctagggaacaaggaagctcgctatggctttcttgccaggaggggtcgaagggaaagtacaagggagctggagctgaccctgggtagaacgggtgaagggatgggggagcgtgaggttccgccctctcttgagactggaaccaattgagggactagtagggcagggggacagaaattgggctcctagtggatttgggtccgtttccgttgggacgttttgggtgtgagaacttaagagctcagttgaccggggatagcctgtgccggagttgatctgcagcttccagcactcgtagtcgggaagaggagcttcagcagcgctgttgtcccacagtaggtcttctgtccgcacccgctctgcgctgcaccctcttaacgctgttcccaggagctggggaaagggatgcttttgcccactcccatggcccctggaactggtggaaacctttcctctaaccagaaagcctcgatatccttaattcaccaaggatccttggcgtggagtcttcctcccttctcccaagtctttctccgtgaacttttcctcctggactttgctaaagcagaacctcccagctctttgctgtctccggttgtctcttccctgtattcatggcaacatcagctgacagccccagttcacccctcggggcggaggatctcctgagtgattcatcagaaccccctgggctcaaccaagtgtcgtctgaagtgacctcccagctctatgcttctttgcgcctcagccggcaggcggaggccacggcccgagcccagctgtatttaccctccacctccccgcctcatgaagggttagacggcttcgcccaagaattgagtcgaagcttgtcagtcggattggaaaagaacttgaagaaaaaggtgagggaagtgtgtcttggagaccactgtggcactagacaccagagagtcttgggattggggttggtaaaaataaaaagctttgatgagatttgaactcttcctgttggatttcatattccttttaactgcataggcagccatgcttataagggagggagtgacctgggacaccataatttgaaaattatgaaacttcccagtgtttttttgtgagagacatctctgctccgagtagatagagcaaacctatggggtaggttggtgagctatttcccgtgcactgggaatgggtaaggtttcttgatcccaagagggagctagggacttaggatagcagctccgatccttccagctcaacactatgttgatagtatggttccaactttggcatgtacatcattaagacatagcttagtcaactacaacatgttacagagaagatagttattagtattgtatagaaaaggtgtcagagtcaatttgcagactggttaggtcttccagagtttgaaaatgatagccataagccatacagtccttacatttgttcttgaatcggcaagaatctccgcaactcttgtcttatacctcctcgattattttatttacactctctttctggcttctgtagtatttgaatttctgattcaagtttaggacatcccttattggatccgtttggtttttcttgttttccaaagtgctggagtgaaaattctaccctggcaataggtaggagatagataacacagactgcatctgatttccatgtggcttttttccaggatggttctaagcatatctttgagatggaaagtgttcggggtcagctccagaccatgctccaaacctcacgtgatacagcctatcgtgagtaagccccttccctagaactatgaaggagaacctagatgtaaggggtgggagaaagtggacagaggaagcaggcaggaaaacctctgagcaagagatttcaggagaaaagtctcccgttctttgggagagggggtgaaggagtgagggaactggaaaggaaggccttttctcttcaggtggcccctgtttttgtcattacctgactctggctttggggtccctctggctgcctgcaggggatcctctcattcctggcgctggctcagagagacgggaagaggactcctttgacagtgatagcacagccaccttgctcaagtgagttctccttgtggttctcctagcttgtttgctttcttggaaatccaggtgttttgttccttatttctccctttattgcttttgtacctcttaagaacccaagaggcttatcacttgcctttcagttttcatctttttctactgtctcctgccccctttactccttcaggaacacaggtatctgttgcctagtacctggctttctcttaacctgcagtcattcttcccctctaaagagttagcttgtttctgctgaaacctttaagtgaatcacagacctgtgtgttatttatagcactatggttatatagctttacgactttggacaagtctcttgccctctctgggtctcagtttcctcatttgtagaatatcacagttggacaagtggattccaaaagctttcccagccctaacattctctacctgatttgctcagcacccggcccctgcaagacttgtctccatctagctcagcccaagccctggaggagctgtttccccgctacaccagccttcggccagggcctccactcaatcccccagattttcaggggctgagagatgcattggattcagagcatacccgccgcaaggtaagatgcaaacgcttcctttcgaaagcagcaaagattagaaagaggggacccaagtgttgaaaagggctgagggggcctggcgtggtggctcacgcctgtaatcacagcactttgggaggctgaggcaggcggatcacgaggtcaggagatcgagaccatcctggctaacacggtgaaacccgtctctactaaaaatagaaaaaattagccgggcatggtggtgggtgcctgtagtcccagctactcgggaggctgaggcaggagaatggcgtgaacctgggaggcggagcttgcagtgagccgagatcatgccgctgcactccagcctgggcgacagagcgagactccgtctcaaaaaaaaaaaactaaaaaagaaaagggctgagggttaagagcctgaaagctgggacttaaatgtttttctgaggagggcttttttgaccattccatctaatatggcaccacctcctttccaagtagtcagatcgccttcttatttctttcatgtagcttatcgttctgatatatcttgtttttttctcctctctaaaatttgagggtccgtatcttgtttgtcttagtactggctgcctaaggtctagaatatacataacacagaaacactctgtgtttgtcgaatggacacaaactctgctagcttgtgcacaggatttacagctactggtgatatactgagctttatctctgtgagcctctgccttagtgtctgaaggggacagagaaatagacaaaggagaggaaaagtcaaaatcactggttgccatttttggaagcctctctttctccatgttaaaccccttggcatgaatgaaaggctttcccctttatccttgctgtgtttattcattgtgtccaatgagcttctgaaggtaggagtaactttgcacattttgctgtgtgggctgctgcatctctgccaaaaggtttatgggatttttactcaggagatccaggaaaaggaggagcctggaatctaagcacttatctcctgaaaaggtacagaaacatgttggagatcttgagcctcaaggtgcttgcttcagaattttcctgattctccctctccagacctattctgttcttgggacccaagcttcttggctccagcccactcccccactagaggagctggaaagtttggtgctgtggtcataccaaagatgggcaacacccagactcctcacccttttccccagcattgtgagcgccatattcagagcctgcagacccgagtgttagagctacagcaacaattagccgtggctgtggctgccgaccgcaagaaagataccatgattgaacaactggacaaggtaccagggtagcaaaatgtgggtgggtctctccatgaagagcattaaggaataataaataagtgggtggccaaccaatgtttcttggtacatgctgagagctgggcaaggggttggtttgctgactgttgggagaagatggctgttgaccctgcccctgtgggtagaaagaggcaaaaaagttattttgaaatttcatcttacttgccctacctaagaccctggcccgtgtggtggagggctggaaccggcatgaggctgagcggacagaggttctcaggggacttcaagaggaacaccaggcagcagagctcaccagaagcaagcagcaggaggtgagcgccctggagcatatggcattagaacctgagtcacagatctcaagatggaaaggggcagaaatagctctggaattagggtttccaacagattgacctcagtcttgtagtggctgtcctgacatttcttctcatccctcctttcttctcctttaaccgtttctgctgtccaacttgaatcatcaatgtcttaatttttcccacaccatgtagtcttctatctggccccttagtcatttagttaactgtgaagtttcaagtttacattgtcaatgctttataaaatatagcacacacagatttcccacagttcctctgccctgtattcctctcttcctgaaagacagtaacccgcctggaacaaagcctttctgaggccatggaggccctgaatcgtgagcaggaaagtgccagactgcagcaacgggaaagagagacactggtgagaagattggactgggttaattccactggaagctgttaattacttctagagagctgtgggctattggtggattgtgggagattataatttgagttgcaccagagcactgtttcccaaagtgtgttccttagaacactaattcagctagatattctattaaaaaaaaaggctctgctaccaagtcggtttgagaaactctgcaaattgtatcatcattagaatattagtgtcatctgaagaattattttaaaatataggctaggcacggtggctcacccctgtaatcccagcactttgggaggccaaggcaggcagatcatgaggtcaggagtttgagaccagcctggccagcatggtgaaaccccgtctctactaaaaatacaaaaaactagctggacatggtggtgcatgcctgtagtcccagcgacttgggaggctgaggcaggagaattgcttgaacccagcaggcagaggttgcagtgagctgagatcaagccactgcactccagcctgggtgacagagtgagactccatctcaaaaaataaaaataaaaaataaaataaaataaagatttctgggactcacctgcagaggttttgattcagtagatatatggtggaactcaaatcttttcagaaatttcctgggtgatttttttcaatctggtttgggacctctggtgtagggcatggccaaaaaaggtatgaaattgactaactcaagtttcttttcgtgtttttttttttttttttttgagacagggtcgcgctctgttgtccaggctggagtgcagtggcacaatctcagctcactgcagcctctgccccctggattctagcgattctcccaccttagcctcccaagtagctgggactacaggcgtataccaccacgcctagctaatttttgtatttttttggtagagacggggtttcgccatgttggccaggctggtctcaaactcctgacctcaagtgatctgcccgccttggcctcccaaagtgctgggattacaggcataagccaccatacccagccacttcactcaagtctcttagagctgaaatgataaggtgattagccatatgaattagtagctgggattggaacttgttgcatgcataatgcatgcttgctacatgcatgctggtacttgtagtcttaacaggctatatctgacagtcctgatgatgatgggtgatggttcacgattataggctggatattctagtcttagtggaatttcttttgacgatgatggtggtaactattgtgtattgagtacttactatgtgcctgatgccgtgctaaatgccttacatatgctttttactttaatgctcagaaggcagaccctgttatgatctccagtttacagataagaatgtatgcctaagaacacatagtaaattccagaaccaggattcgaacctgagatttgaacccaggtctacctggctctggaacaggaactcttatctactatattataatcctatgagcttgtcaactattgtgtttgtttgttttgagatggagtctcgctctgttgcccaggctagggttcagtggcacaatcttggctcactgcaacctccgcctcccaggttcaagcaattctcctgcctcagcctcctgagtagctgggaatacaggtgtgcaccaccatgcccagctaatttttatatttttagtagagacatggtttcaccatgttggccaggctggtcccaaactcctgacctcagatgatctgcctgcctcagcctcccaaagtgctgggattacaggcatgagccactgcgcctgtcaactattgtggggtttcttttggttttatttgagatggagtcttgctcgatgtcgcctaggctggagtgcagttgtgtgatcccagctcactgcaacctccacctcccaggttagagcgattctcctgcctttgcctcccaagtagctggaattacaggcacccaccaccacgcctggctaatttttgtatttttagtagagatggggtttcaccatgttggaccaggctggtctcaaactcctgacctcaggtaatctgcctgccttggcctcccaaaatgctgggattacaggtgtgagccaccgcacccggcctaattattgtgtttttaatgagcataattctcagcaggcaccttgtatgagggtcagagggcagatcgctggtctctgaagagcctactaaggagcttggttttcttctgcggctgtaggaggaggaaaggcaagctctgactctgaggttggaggcagaacagcagcggtgctgtgtcctgcaggaagagcgggatgcagctcgggctgggcaactgagtgagcatcgagagttggagactcttcgggctgccctagaagaagaacggcagacctgggcccagcaagagcaccagcttaaggaacactaccaggcgctgcaggaggagagccaggctcagctggaaagggagaaggtaaaagtggcagttggaagagctgaggaactagggagtagatgaagggcaaaataattgaatgggatggaatgttagaatatgggggatacatataggcaggaatggagagtagagagccatgtgtgggagacaaggttgagagtatagggccagcaggaagggctgggggtaatgaatacgtgaaaggccaaagactgaaattcaacagggatggggaaataaaacaaatgggaggagctgggggaagcttggattttagggtttgggaggatgaactggggagtgtaggtaaccaggagataagaaatgaggtatgtatatacatttgatttgtctttcataggagaagagccagagggaagcccaggccgcctgggagacccagcaccagttggcattggtgcagtctgaggtgcggcggctggaaggagagctggatacagctcggagagagagagatgccctgcagctggaaatgagcttggtgcaggtcagaaggcagaggtttcttgaggttttgttctgacagaagtagatctgaggcagagggacctctcaggagttgtggcagacactcccagttcaggtgtttggggtttaattccattaacagtttctatgtagtatgggtagttttctgtcctaaactcagagctatttcttactgagtgaccatttcccacaatatgtcagactgacctagtgttacttttaggattaaatagatttaaatctattaaagataccttatgttattttaagagatgacaccacacttagtgggttgacagagcaggtgaaagcttttgtcagagacttgattccaattgtaacagtgtgctttgtaattctcattacttgaataacttgtattaatttctctgagtaggtcagggacccaggagggcaatgattttttaatttacttatgaaacttccataacagcacatggcctggcacagaattgtactcaaaaattgtttgtcagatataattacactttgaaaaactctttccatctagctaacacactgaattttaaattcaaactagtcggactcttgccatggaatagagcaggagttggcgaactttttctgtaaagggccagacagtaaatatttttagctttgtgggttgtatggtctcagttgcaactacccaactctgctgttataccacagaagtagctataaactgtacgtaaacaaatgggcacagctgtgttctagtacaacttatctaaacaggcaatggagggctgaattgggctgtagttcgccgatctccagaatagaggaaaggattggagagagctgtgttccagcccatgggggagacacagcgttgaagaggaaagagtattgcattaggacttagggcacttacgtctacttctagctagaattttgacctttatgggcctctgtttttatgtataaaatgtgtaaggacaaattgatgaattttccaggtgcaagccagtctgagaggctatgttccttataaatggttaacttaaggaggtaccagtgaggccagcatttgagaaccacaatcctttggcccggtatggtggctcatgcctgtaatcccagcactgtgggaggccaaggcgggtggatcacttgagcccaggagtttgagaccagcccggccaacatggtgaaaccctgtctctactaaaaatacaaaaattatccaggtgtatggtgcacacctgtagtcccggctactaagaaggccgaggcaggagaatcgcttgaacccgggaggtggaggttgcagtgagcccagattgaaccagtgtactccagcctgggcaacagagtgagactccatctcaaaaaaaaaaaaaaaaaaagaattgacctagggcttcaggtgttacaatgagatcacatgcgataaagactaagaaagcatccgggtgtggtggctcgcacctggaatcccagcactttgggaggccgaaacgggcagattgcttgagcccaggagttcaagaccaacctgggcgcaatatggcagtacctaaactctgctaaaaatacaaaaacttagccgggtatagtggcatgcacctgtagtcccagctactcgggaggctgaggtgggaggatcaactgaaccctggaagtagaggctgcagtgacccgtgatcacaccactgcactccagcctgggtgacaggagcgagaccgagtctcaaaaaaaaaaaagacagaaagggccaggtgtggtggctcacgcctgtaatcccagcactttgggaggctgaagtgggaggattgcttgagtccaagagtttgagaccagtctgggcaacataatgagaccccatctctacaaaaaataaaaatattagctgggtgttgtggcaccagcttgtagtcccagctactctggaggctgaggtgggaggatctcttgagtctgggaggtcaagactgcagtgagccatgatcacaccactgcactttaggctaagcaacagaacaagactctgtctcagaagtaggggctgagaaataaccactatttggatttagaaattgagttctttgggccatgcgcggtggctcacacctgtaatctctttgggagactgaggcgggtggatcacgaggtcaggagattgagaccatcctggctaacacggtgaaaccccgtctctactaaaaatacaaaaaattagctgggcgtggtggcacgcacctgtagttgcagctacttgggaggctgatgcaggagaattgcttgaacccgggaggcagaggttgcagtgagccgagatcgcgccactgcactccagcctgggtgacagagagggactccatctcaaaaaaaaaaaaaaaaaaaaaaaagaggttgagttctttatagtaaaatactatacgtggaaatcagattttagtgagttgaaggactgtggctgagaaaatggagacacttataggttgactgcttaaggaggaagaggcactgccatttattgaatgtctactggctttcaggtactctactcagggtattttttttttttttttttttttttttttttttgagacggagtctcgctgtgtctcccaggttggagtgcagtggcgcgatctcggctcactgcaagctccgcctcccaggttcatgccattctcctgcctcagcctcccaagtagctgggactacaggcgcccgccaacacgcccggctaattttttgtatttttagtagaaacggggtttcaccgtgttagccaagatggtctcgatctcctgacctcgtgatccgcccgtctcggcctcccaaagtgctaggattacaggcgtgagccaccgcgcccagcctcagggtatgttatatcagacacgtagaatggatttgattgctctgtcgaacatttattttagctaagaaatttatgtctttcacccatagtcattttcactttgatgtatgtttaaagtgcgaatatcttaataaggaaagggaacctctttcactccttgaggcaaaattcttgttcttcatctcatatgaggggaaagttggtactggattttgtctacattatatcctccatcctcttctaagcccaaacagatttgggccgttatcccaccttccttcactccaggcccggtatgaaagccagcggatccagctggagtcggagctggctgtgcagctggagcagcgggtgacagagcggctggcgcaggctcaggagagcagcctacggcaagcagcctccctcagggaacatcacaggtacgtgggactcactgggtgtcacttctctcagccacagcacgtatcgttagtgccaggcctgtgttcccttcaatccctttgccatggtccagcactgtgactcccagggtgcgctaactcccatcagctgggacctgagtctctctcgggagggctgccttcacgcgttcatggagagccagaagtgcctgggaattttcatcccatagggagtagcccttaaccaagaactgatgggtgcagaatgatagatggtccagctccctcactgggacagtgctgaggtatgacctgtgctgtctccagagctgctctgtcggactgagcctcctcgcagcctggcctcacttctcctcacacccattctgctgccgagattttctggaactgcttccgaaataaatttatttaagtctctgcttctgaggaacccatcctaagaccccagctttgtccttgccgcttcctgtgccatggccaggctagctgactggctatctgggtcactgtcatgtgcacacatgatgtctttttctcagttggtcacttcttctgtctccagtctcaggcctcttctcctacctgtgccctgtaggaagcagctgcaggacctgagtggacagcaccagcaggagctggccagtcagctagctcagttcaaggtggaaatggcagaacgagaggaacggcaacagcaggtggctgaggactacgagctcaggtcctggtccccagagtgcccctttcaggccccagcccctttcccatgggtagagcccaaactgggaacggtgaagagctgctcccttgattgatctgtcctcctctacatgggccccagctcctttcagaatatcagatgtccaacatttcccttctggctctttttagctcccaagtatctgcttccttaaaggccctgagtcacttcttctctctttgcttcagactggcccgggagcaagcgcgagtgtgcgaactgcagagtgggaaccagcagctggaggagcagcgggtggagctggtggaaagactgcaggccatgctgcaggcccactgggatgaggccaaccagctgctcagcaccactctcccgccgcccaaccctccagtacgccttaccccttgagctaagcttctccgttatgttctatttttatttttatttttgagacagggtctcactcttgcccaggctggagtgtactggtgagatcatagctcattgcagcctcgaactcctgggctcaagtgatcctcccacctctaactcccaaagtgctgggattccaggcataagctaccatgcccagcaagaactgtgttctagattccttctttggaaatctagctccctcccaagggaagtactaagttcagctcctaaggcctacatcaggggagaaaaatcggtggactttacaaataataactgcctcagcaaaataaatccttttttccatggccatagctcactcagactggccccattccattgggcataactctagtctcccagtcccaagaggggacaaatgatacgtggtactagttttgtggagggacagctgaattaattatgagggaaagggccaaaaattgttgccaagtcctgccccagagtagagtagggagtctcacttcctagcccttcatacgttgatacttcccacttccttcttttaattatgaaattctagcaggtgtggtggtgcgcctgtaatctcagctatatgggaggctaaagcagaaggatcacttgagctcaggagttcaagactagcctaggcaacatagtgagacctcatctcaaaaaaagaaaaagaagaaaaaattaggatattttaattttaattttatttatttatatacttatcatttatttatttgagacaaggtctcactctgttgcccagagcgctcaagcaatcttccttcctcagcttcctgagtagctgggactacacacacgtgccattgcccccagctaatttttaaattttttgtagagatggcatctctctatgttgccaagcctggttcaaactgccagcctcaaacggtcctcccaaagtgttgggattacaggtgtgagccactgcatccggaaatttataatcttattaaagtgtttgtaccatgtcttatctctttaaacctactgtgctttgacccttctttctgcctctctcctggtcaggctcctcctgctggaccctccagccccgggcctcaggagcccgagaaggaggagaggagggtctggactatgcctcccatggccgtggccctgaagcctgtattgcagcagagccgggaagcaagggacgagctacctggagcgcctcctgttctttgcagttcctcctcagatcttagcctcctgttgggcccctcttttcagagccagcattctttccagcccctggagcccaaaccagacctcacttcatccacaggtaactgggggcagaagtcactggggttccccttctgtgcatgaattggctccctctttcgtaccctgctttctgtctgatacttgagcatttagtttcccagatgcctttagtgatcgcaagttgcaaggagcagaaatctgctcacattggtccaaataaagggattgagatctcatggaaatatgacatcgctggacttaatgagaactggagttgggaacggggtactatcaggaactgaggcagctagctggcccttttctgtgggcctgcatagcctcctgggtccacctctcctgcacatctgctcttttttcttgctagaccagcattcaaggttctcacccttcataacttcagtttacacatgggtttgaccagctgtgatactgactctagctgagcctctagacatttatagagacatcggtgtctcagtttttttaggtccagtttaaagaggccatctgattggattggctgaccttgggtgtggtgtccacccctagtttaatgtcacctgtgatttgagtggatgggggcattctgtgtggtacaaacatgacaacctaggtcgaattaaaaatgagggatggggccgggtgcagtggctcacgcctgtaatgctagcgcgttgggaggctgaggtgggaggatggcttggtgccaggagttccagaccagtctgacccatatagtgagacctcatctctacacaaaataaaaagttagcaggatgtggtggcacacacccaaatttccagctacccagggaggctgagacagaaggattgcttgagccaaggagtttggggctacagtgagctaagaagttgccattgtactctagcctgggcaacacagcaagactctgtctcttaaaaaaaaaaaaaagagattacagctcacgcctgtaatcccagtactttgggaggccgaggcgggcagatcacaaggtcaggatatcgagaccatcctggctaacacagtgaaaccccgtctctactaaaaatacaaaaaagttagccgggcgtggtggcaggcatctgtagtcccagctactcgggaggctgaggcaggagaatggtgtgaacccgggaggcggagcttgcagtgagccgagatcgcgccgctgcacttcagcctgggcgacagagcgagactccatctcaaaaaaaaaaaaaaaaagagagattagttgtagcacaattaaaaattttttaattatgtgagaataataaaagaatgaggcatattcgggggaagaggtcagaacatgtgtgttactcatttccattcttcagggagtttgtgagggtatttatttgtttagagtttgagtaccacagctttcttctgtctatatttctgtcttagaattcagctgtgccatctctcagtcacctccaacccttccctctccagctactttaaacctccatcttcatcttctcttagctgtgatgttcctcttccatttaataggcccctttcttctgagtattaggtgagttgatttgtggagaagccccttcccccctgaacacacttgcacccacccatacctgtttcactttatagctggggccttctctgcacttggggccttccatcccgatcatagggcagaaaggccattccctgaggaagatcctggacctgacggggagggcctcctaaagcaagggctgccgcctgctcagctggagggcctcaagaattttttgcaccaggtaagagagattccacccagactagctcactttcttcttccctttctcctttcctctttctgctctgggaatccaggactctggcctcattccctgtttatgactaactctttgtcccagcttcttctctcagatccctgggcgtttttctctatcagtccctagggaacttgacaatcttattcacccacagttgctggagacagtgccccagaacaatgagaacccttctgtcgacctgttgccccctaagtctggtgagttccaactctgaagaaggttggggctggggcctaggaaagatcggagttggttatctaggatgaatttttaggagctggcaaaagtaataaagccttataaatgctgggtggtgggacttccttggttctatgccccatttcctgattcttggcattctttccttttgctaggtcctctgactgtcccatcttgggaggaagcccctcaagtgccacgtattccaccgcctgtccacaaaaccaaagttcccttagccatggcatccagtcttttccgggtccctgagcctccctcctcccattcacaaggcagtggtcccagcagtggttccccagagagaggtgagcatgttctggtttattagggaaaaaaggagggacagtcctgagtgtggatccagtacaggcacttacagtccttctgaattcctggggaaatgggctgagggctggggagacaggccctaggatgacgcctgtgattattgcgatgtctgtcaggtggagatgggcttacattcccaaggcagctgatggaggtgtctcaactgttgcgactctaccaggctcggggctggggggctctgcctgctgaggatctcctgctctacctgaagaggctggaacacagcgggtacaagcctgggaggaaggaggaaggattctccgggtggaagctggattatggggagtggagtgggtgtgttttacactgaattgaatcgttgtccttttctggggaggaaagtgaaggatgagaggtggatccacagatcttctctaactgccccacacttttcttttatctcctcctttctattgcttttttcttctaaacaaaaaaatcttttccccgggtctctctaccttcgtttttttcctctttacccctcagctcaaaactcagaatcctagacttttgactagctagtgtaactcgttatttacttccactaatgtctcctcccagttgatgcccaggtctatcgagtttgatcttattcttaagagatagaattggggagtagttcttccatccagtattgggtaaccggggggacggagatccccatcctcatacctttgatttgtgtagcaggactgatggccgaggggataatgtccccagaaggaacacagactcccgcttgggtgagatcccccggaaagaggtgagggaaagtcaggcagggaccaggggagaaaagggctctcactgaccagctccttcacctctgcacactcctggctggcccctccattccacccctgcattctgtagcatggcctttcctccctgcagactcatctggccctctccacgtgcatttcctcagtggggtggggaattgagaggatctgacgctgatttcttcctctctcttccctcaactctcagattccctcccaggctgtccctcgccgccttgctacagcccccaagactgaaaaacctcccgcacggaagaaaagtgggcaccctgccccgagtagcatgaggagccgggggggagtctggagatgagcccccctaccctctctcctctttgttctctcattgttgttattttaataaatgctcattagtctgtatcagagtctctggctcataggaatttggaaaatagaggttttgtagggaatcacttcgtaaagaaaccacatttggttgagtactttttttatatgttacatgtttatatgtcatttcctgtgggaaaagacatgaatgctttggaagacggtctatgacaagatttggaaagttggggcggctaagattcagtggacaaagctaaaacctgcagagcaatgaactctgggtggtagtggaattatgggtgattcttagttttttaatacgtttctgtattttccaaattttctaaaacaagtatatgttactttaataatcagaacagacccaaactttaataagagtaagttattgtataaagagtttgagttaaaatttggttgttggggagaaagttttctaagggaaaataattctttcaggttgcatttgtaggattcagattggcagattctactccagccagcagacatattgttgctatagtcttcacgcttacagctttaaaacgtgtaaaagactagagtgctgggtcctaattaaacaaaagagtttctgcacagcaaaagagactgtcgacagagtaaacagacagcctacagaatgggagaaaatattctcaaactatgcatttgacaaaggtctaacatccagaatctattaggaacttaaatcaacaaacaaaaaacaaatacctccattaaaaaatgggcagaggacctgaacagacacttcgcaaaagaagacatgcaagcagccaacaaacatttgaaaaaatgctcgttaataatcatcagagaaatgcaaatcaatttaatgcaaaaccccacaatgagataccatctcatacctatcagaatgactattattaaaaagtcaaaaaacaacatgctggcgaggctgcagagaaaagggaatgcttatatagctgtcagtgggaatgtaagttccgccactatggaaagcagtttagagatttctcataaaacttaagagttaccatttcacccagcgatcacatcactggatatatacccaaaggaaaataggtcattattccaacaagatacatgcatttatatgttcattaccacactgttcttaatagcaaagacatagaatcaacctagatgcccatcaggggtggattggataaagaaaatgtacatatacaccatggaataccacacagccatgaaaaagaatgaaataatgtcctttgtagcaacatggatggagctgaaggctataatcttaattaagcgcgttagtgcaggaacagaaaacctcatactacatgttctcctaagtgggagtaaacattgagcacatgtgaacatagacttgggaacaacagatactgcagactcccagagcagggagggagggagggagggggacgcgggttgaaacactacctaatggtactatgctcactacctaggtgcaatatacccacgtaacaaacctgcacatgtatgccctgcatctaaaataaaagttgaaattgaggctgggtgtggtggctcacactgtaatcccagcactttggaaggccgaggcagacagatcacttgaggccaagagttcgagaccagcccggccaacatggtgaaacactgtctctattaaaaaatacaaaacattagccgggcatggtagtgggcacctgtaatcccagctacttgggaggctgaggaaggagaatcacttgaacttgagaggcagaggttgcagtaagccaagattgtgccactgcactccagactgggtgacagagcaaggctctgtctgaaaaaaaaaaaaaaagagagttgaaattgaaaaaaaatagactgctggcaagaaaactaaaccatgtttataaaacttccatttaaatgctcactaaaatggacaaagaaaaacaatactagggaagaaaataacgtagacatgaaatttaaaaaggccccaaattcatggtacaaacactgaaaagcactcagtcaaactgaaactggaagaggatatcctaccttgagactcacacgcagctctcagctctggcacatggtgcagggtagtggtgatggcaggtacaattctgaaagtggtgttggcaggtaagaggtgggtgtttgagggacagagtttaccagattctgagaagaaggcagggcccttctatctgaccctgagttatacacatgataggatgtggattcatagagtgttttgtactaatgtttgcattttacttccacctaagtaactttctagcccccaggggacgggcaaaggaagaaaaggtgaagatgaatgaccagacatgtgggttgccctgctcagctgtgtcagaacggcttgatcctcagccccgcacaggaccactctctggcatgcaccagcggagaaactggaggcacactggcgcaggagcagccccaggcttgagggcttttccagccctgtctgtttacccacgtatggaaatgtttacttttctattttttaccttaaatatgtaacactggtttgaccaaactctcagattcatggcacactatcatcattggtaggtgatggtttgctacggtttttaatagctggtaaagtgaacacccagttcattctcctcattatctcctggattcccgcctaccgccatcagtcagtatgccctacatttttcttgacgtgaagcacagcctggagaatattccctgaaacagctctttaaacgcaatccaaaaaaggcatcatgctgacttaaccatgttatgaggtgagtaaaacaacgttgatttttaaaactgtatatattggctgggttcggtggctcatgcctgtaatcccagcactttgggaggccgaggtgggtggatcacctgagatcaggagtttgagaccagcctggccaacttggcaaaaccccatctctactaaaaatacaaaaaattagccaggtgtggtggcacatgcctgtaatctaagctactcgggaggctgaggcaggagaatcccttgaacctgggaggtggaggttgcagtgagccgagatcgcgccactgcactccagcctgggcgacagagtgagactccatctcaaaaaataaataaatacaaaataaaactgtatatattatatccacattaaaatctgaagaccaccaaggagactggggaggaagagaaaacccacagtcaagcagtccccactttttcctcccaggatcgtcgtgggaatatgctgggggcgggggaatgaaagattttaagagttcataaaaactcacttgcagagaaagtaggtgcagccttcttgaagctcaggtttcacagggtgtagatggggggttgacctgggactttgtctcctaagaactctcagagctgttgtggttgggagtggggaaggtcctggaagtggagtttgttagggtgaaggctaataacaaacccagtgatacactgacttttagacaaagttcatttccctggttatggtccagagcagtggagtcagtcctgctttatgtggtcacttagagtctcagattccttccatctcattgctctgctgtcccctagagcagtggtccccaacctttttggcagcagggacgggctttgtggaagacagtttttccacagacaggggtgcggatggtttggggatgattcaagcacattacatttattgtgcactttgtttctatcattattattattacattgtaattaaacaattatacaactcatcataatgtagaatcagtgggagccctgagcttgttttcctgcaactagacggtcccatcaggggataatgggagacagtgacagatcatcaggcattagattctcataaggagcatgcaacccagatccctcgcatgcgcagttcacagtagggttcacgctcccatgaaaatctaaggccgccgctgatctgacaggaggcggagctcaggtggtaatgcatgtgagcaatggggagtggctgtaaatacagatgaagatttgctcgcttgaccgccgctcacctcgtgctttgcagtccgattccaaacagtccacagaccgctactgattggtggccaggggttggggacccctgccctagagcactgttgttatttgtgtggctgaagcaagatcattgtcacttaggactcccagctggcaagcaggggaaagagctatgtccaatgtcttaagacccatacctggaaatgccacatatcagttttgctcatatttcattggcaaggctttgatcatatggtcgcacctggctgcaagagacttagaaacgtagcctagctgggccgccacgtatgcggctatgactattattatgcaggaactcaagaggaaggagagaatggatttcgatagacaactagcagtctgccctacacaggataggacctcccttagaggaattgaaaactaataattgccgagacaacccatgccaataattagtagtgaatgtgcagataatgaaaagacgcattggacatgtaagttagtccaagctacacaattgaactaattagctcctacaaaacagttaatgcgggaaaaaggaaagaacttcaattccagtcagcattattattggaaaatgaaagatggtgtgaaaaagatgcagccatagaacaagaatttggagttaaaaaacaacaaaaagcagaattgactctactagaaatcatgcatattaactagaagaaaaattggaggaaatctccaagtttacaaaagggagaaaatatgtaaattatgaaagaaacaatagaaaaaaaatggatccagaacaaatatctaggagaaaatacagtaatcatttaaaaaataatagaaaattctgattctgaaagtatggttgaatagataactcgactcctgctgaatcataactagatcccggtggtatgacagtaatttttaaaataacttttaaaattttgttttatttgctgcctgccttgtttggcaaacactttttaatgcattattgggttgctaaaagtaaaggaagttgaacttgtatttctagtatgaagtggacctagataacctggctgaccttcctactgaaatacctaaaaaatgttagataaaatgtatttttaaaaaatcttaaatgcattgatgagctggcaagaaagaaatatggcaaaaataaaggcgggaacataaagtttaagtggcacatttaaattgctttttatcagccggaggtgtcatcttccagtaattcaccaaaatgacaaacacaaaaggatagatagaggagggccacccactctatgttctccgggccttttagaaaacatggagctgttcctttggccacctagatgtgaatctataagaaaggcagtattgtaggccaggcgcagtggctcagcctataatcccagcactttgggaggctgaggtgggcggattgcttgagtccaggagttcgagaccagcctgggcaacgtggcgaaaccctgtctctacccaccccatctctaccaaaaataaaaaaattaacctggtgtgctggtgcgcacctgtggcctcacctactcgggaggctgaggtgggaagttcccttgagcttgggaggtggaagttgcagtgagcagagatcgcaccacagcactccagcctaggtgacacagagagaccctgtctcaagaaaaaaaaaaaaagaaaaaaaaagacaatattgtagacatcaagggaatgggtactgttcaaaaaggaatgccccacaagtgtcaccatggctaaactggaagagtctacagtgtgccccagcatgctgttggcattgttgtaaacaagttaagggcaagattcttgccaagagaattaatgtgcgtattgggcacgttaagcacctctaagagccaagactacttcctgaaaagcatgaaagaaaatggtcggaaaaagaaggaagccaaagagaaaggtacctgagttcaatggaaatgccagactgctccacccagaggggtaaacactggtaaagacgctcagcctcattaggaaggagggcagtgcacactgaaatcaaggtgatctatcgcttcacaccatcagcgaggcaacatttgtaaggtccgagtgtatcaagtgtcgctgaggatgtggagcaatagaaactaaacttagactctgctggtgagagaaccgcaaaggataagtaggccatttcgggaaacattttatcattacttagtaaatgtgatgatgcacacatccctatgacacgctaaatccaccccagggatgtgccctagaaaaactcttgcccacgtgttcaccaggagacaagaatgtcatagcaaaaacctgcaagcaatcaaatgtctgttgccaatggtagtttcatataataaaatatcacacaccagtacaaatggatgtactacagttacatgcaacccatatgcatgaatttcacaagtcatgttgaatgggaaaagcagattgcagaagaaaatgtacatatactgtttacgtaaagctgaaaaatcagcacagagctgggcccagtggctcatgcctgtaatcccaacactttgggaggctgaggcaggaggatagcttgaggccatgagttcaacacaagcctgggcaacacagcaaaacctcatctcccccccacctcccccaccaaaaaaagaaaaaagaaaatccctcagaaaaacaaaacatccaaatgcatgtaatgcatatgtcaaattgtattaagttgctgacaagggaaaatagtaagaaaacaaaggagtattccagctctgtggaaagctgctgctgtgtacctacaggaaattctctgagagctggggctgggcaagagccaagagagctgctgacagcaaagtgagagaaggcaggcctcagaaaggagaagagaaagatgcctggcaagcgagaagcaactggaatgctctgtaactcacattctctataaatctccaaattctctcactagcagcatcttaaagtgtgtgtgtattttttttaacttttattttaggttcgggagtacatgtgaaggtttgttacataggtaaattcatgtcttgagggtttgttgtaccgcttatttcaatacccaggtactaagcccagtgcccaagaattatcttttctgccccgctccctcctcccaccctccagcctcaagtaggcagcactgtttgttgttcctctcttggtattcgtaagtatttagctcccacttataagtgagaatatgcggaatttggttttctgttcctgcgttagtttactgagggtaatggcctcccgctccatccatgttcccacagaagacatgatctcgttcttttttttgcggagtctccctctgtcgcccaggctggagtgcagtggtgtgatcacggctcactgcaagctccgcctcccgggttcacgccattctcctgcctcagcctcccgagtagccgggactacaggcgcccgccaccgcgcccggctaatttttttgtatttttagtagagacgggttttcaccatgctagccaggatggtctcgatctcctgacctcaggatctgtctgcctcggcctcccaaaatgctgggattacaggcgtgagccaccgcgtccggccttaactggaattttaaacctttattttctcctataaagcttgttcattacagaagattagaaagcaaaattataaataagaaaatagaaatcaactgaaattctgtcacccagagaatcattttcttttttaatacactcacacacatacataaacggaattacattgtacatatagttctcatcaaatttttttctcttaatctcattacatattattttaaaacaattttcaactgctgtttaattttatgtcctcaaggtataccataatttatatgaccataatttatatgactgttgttatataaatttatatatatttatataattttatataaaatatatatataatataaatttatttagtccccacttattggactaaataaatatttaccattctttgctgttataaataatgatgaatgaatattctcatatgtacaccttggtgtctctgttttctagaagtggaattactggttcgaacagtctgaacatttttaagatccttaaaacataatgccaaattgtttttcaaaaagatcgcaccagtttacacttccaccagatgtgtagtaaaagtacaaataatactcactgaggacaccctggcgtgtcatttcccatgctagaatgccttgcccttatttgcttgaaatgaacttacagagtaacctctgtgtgcatgtgacctggacaggttgccttcagggcatagatttgtcagtgtcccacaaggcattttttggatgatgtatccattaggatgattttggtggcacgtaattgaaaccctgactcacgttgtctttagcaagaaggacacagaaacagggtgggctccgagtgtggtaaggttaatggcacaatgaagtcaggaactcaggttcttttttttgagatggagtttccctcgtcgcccaggttggagtgtactggcacaatcttggctcacctcccatgttcaagtgattctcctgcctcagcctcccaagtagctgggattacaggcactcgccaccatgcctggttaatttttgtatttttagtagggacggggtttcaccatcttggtcaggctggtctggaactcctgacctcgtgagccacccgcctcggcctcccaaagtgctgggattacaagctgaaccgccacaccctgccaggaactcaggttcttttcgtgtctatccttccctcctcaacaccggcttcctcctcagactggctgcaggtgtttcagggctctatccagatgtaacaaagcccatggccacataggctgtgcaccaccacgcccggctaattttttgtatttttaggagagaaggggtttcagtgtgttagccaggatggtctcgatctcctgacctcatgatccgcccgcctggtcctcccaaagtgctgggattacaggcatgagccaccgtggctggctatggtaattatttttgaaatgtacatggccaggcatggtgctcaagcctgtaatcccagcactttgggaggccaagtcaggaggatcgcctaagtccagtagttcaagacccacctgggcagcaaagtgagaccctcgcctctacaaaaaatttaaaattagtcaggagtggtggcacgtgcctgtagtccccattactcgggaggcttgatctcaggaggttgaggctgcagtgagctgtgttcatgtcactgcagtccagcctgagtgacagagcaagactctgtctcaaaaaaagtccaaaaacccaaaaagaaaaacccaaaataaataaaaacatacaaattttcaataaatatacatcaaaatatgcaaattaaggaagtgtagaatcttttaattttaaattgtcatgttttagaagtgatttttcttctagtattttaaaaatctttatcttctgaaaatattttcaactattaagataaaaaatgcagccgggtgtcgtggcttatgactgtaatcccagcgctttgggaggccaaggtgggcggatcacttgaggtcaggagttcaagccccgcctggccaacatggtgaaaccccttctctactaaaaaaaaatagaaaaattagccggtgtggtggcatgtgcctgtagtcccagccacttgggaggctgagacagtagaatggcttgaacctgggaggcagaggttgcagtgggctgagatcacggcactgcactccagcctgggcaacagagcaagactccatctcgaaaaaaaaagaaagatgaaaaatgcaagttataactaataaatattaaacatttaagcaaaatcattctaataaagctgaaatacttaaatttttgaaaatttattaaatcatcttcacaaaagtatttgtggttctagcattcaatatcaacagttgccagtatgaaaaaccagcatcctacttcatctctgctatatctagacatacatgcacaccaacttaagagcaatatggagtgtttgctattacggaatgttcctgggcagtcttgtgcaatggttgtgggcactgttagtttatgagaactacctacttgatagctaacagttagattgtcccatagacaaagatcagtgtgttccaaactgaactcactggattcctttcctaaacctgctatttttctgctttctctatctcagcaaagaccttttctctgtctctgtcaccactcacatccagtttgtcaccatgacctgctgattcttcctgtgtgaaatttctcctcacttctcccatcctgctcttattctctcctgggttattgggaccacttcactcttggtctccctctgtcctttcatggctctctccaagcgttcccacttggtgtgctctttctaaaatgaaaatcggccaggcgcagtgactcacacctgtaatcccggcactttaggaggtcgaggtgggcagatcacctgaggtcaggagttcgagaccagcctgaccaacatggtgaaaccccatgtctactaaaaatacaaaaattagctaggcatggtggcgcacgcctgtaatcccagctacttgggaggctgaggcaggagaatcacttgaaccctggaggcagagattgcagtgagctgagatcacaccattgcactccagcctgggcatcaagagcgaaactccgtcgcaaaaataaataaataaataaataaatagcaaatctacttgtcaaaatagcatgtctttaataaaagataaataaaaataaaaaacaaaataaaacacacatctatactcaccttcatggaaccctcccaaatctgagcacagtccgcagggcccctgcctctccccaacatcatgctgtggttgcatgtgcttcatcccatccggagctccaggctattgctgctgtttttcctgtgttctcatcccaggggcctctccggggcaggtgatcctccttgaaatccccatgtccttctctggggcccagaaattccatctgctgctcctgtggtcctctgggctcagggaaaccccgtgggactcccaagacccttgttgctctgtccaggctgggccaggcagaccccgggaggcctctgccccgttaccactctgccgtttctgctttggggtatttttccatcttggggtccaccccaaggatcctcaaacttagcggtgtctgattctgtgccccgaccttgaggttcagctgatgctgggggtggggttgagagcattccacacaaattcaacccctttctctcagtcttctgtcttgggagccaagagcccagcccttacatcctatttgccaggttccttcctgtgtcccaccagacctagaccttggaagtttaaaagccagcagaagacttaatttttcctgtggctcgcgcctgtaatctcagcattttgggaagtcaagacaggcgttcgagaccagcttgggcaacatagtgaaccccccaccccaattttaaaaacaaaatacaaaaattagccaggtgtggtggtgcacacctctgggaggtaggggtgggaggatcgtttgagcctggaaggtagagactgtagtgagccgtgattgcgccactgcactccagcctgagtgacagaatgagaccctgtctctaaaaaaaaaaaaaagagaaagagagagggaattattcttatacacctagatgtaccacattttccctgaggcagtgaattcagaatacttggaaaggtaaatgaggaagggttaagctttaacaggaaaaatggggaaaaaagtgagtaatatttcaaaatattacctttctatacaagggaaaggatccaaattataccactgtgtcgtaaaaattattatgacctgaagacatttgagaatcaacagatgcagaaagaggctttgtctgaatactcccttatctgactaaaagcagaaacttctgggagtgagactgccactagccccctctctggaggagtttcacggctgtgaagaagatgaagaagaccacaaacaaacatgatgaagaaccatcttgtctcctggtttgttctcctaaaaatacatttgtctttcctaaataaacccatttgttcttccagtagaagccttttcctccctgctcctttacccttattaaggtaggcttgtaaatccctgtctttagttatggataaagtcattttctttgtgggttcctagtatgtgaataaactttatcttttcttttgttaatctgtcttttgtcagtttaattcacagccccccaagaacagcatctaagagggtggagaagacatttttcctccctgacgcaagcaatcacttcagagtcttcttgatattttaggtagaatttaggtactctagttcccgcagggggattccagtctcagacaacccaccgcagtaggaccgcttcaatcatacttcataatgattttctcagtatgagcttgttggcttagagctgcggaagagaagtcacaaagaaagcctaaggtttcagagagcactgaggtaagctcaacccaggtctcaattcaatttctagaagaggaggacactagtggaaatcatttccatgtatatcctgtatttccagggccgaaaccaatacagtagtatgtctgcttcttacagttttttttccctatgcttatacacttttattttctacatttttggactcacacttacgtatactattttgcacctttagcttatactatttattaaatatatatttatattgtgaagatgaacatttttcaggacattaagcattttcttttcttttcttttctttctgagacagtctcactctgtcgcccaggctggagtgcaatggcatgatcttggctcactgcaacctccgtctcccaggctcaagcaattctcctgcctcagcctcccgagtagctgggactacaggcatgtgccaccatgcatggctaatttttgtgtatttttagtagagacagggtttcaccatgttggccaggctggtcttgaactcctgacctcaggtaatccacctacctcagtctcccaagagctgggattatgggtgtgagccactacgcagggactgcctgcctgccttccttccttccaaggcaggaggatcacctgaggtcaggagtttgagatcaacctggccaacatggtgaaactctgtctctactaaaaatgcaaaaattagctgggtgtggcagtgggcgcctataatcccaactactcgggaggctgaggcaggagagtcgcttgaacccaggaggtgaaggttgcagtgagtcaagatcgcgccactgcactccagcctgggccacaagagtgaaactccatctcaaaaaaacaaaatagacatttgagttctaaaaaacaggcattctagtttgaagatactccaactaaaacttcaatgaacattcttgtgcagttttttttgtttgttttctttaatatagggtctcgttgtgtcacccaggccggagtgcagtggtgtgatcatggctcactgttgcttcaacctccccggctcaagcgctcctttcctcagccccataagtagctgggactacaggtgcacaccaccatgcccagctagtttttgtatttttttgtagagatggggtttcgccatgttgcctaggctagccttacactcctgagctcaggagatccttctgcctcagcctcccgaagtgctgggattacaggcgtgagccactgtgtctggccttcttgtataggttttttgatggacatgtgctcttgtttctgttgagtatttatctaggagtgaaattgctggtggctctagatttagctttggttttctaaagtggttgaaccaatttatacacctcccagtaatgcatgagggttccagttactccccgttcccaccaacattcagtatggttgttgcttcccatcttagccattctggtggctgtgcagtgatatcgcactgaggtttcaatttgaatatgcatattttattatgaaagtaatatatttttatatatgtagaaaatttaggccgggagtggtagctcacgcctgtaatcccagcactttgggaggccaaggtgggtggatcacctgaggtcaggagttcgagaccagcctgaccaacatggagaaaccccgtctctactaaaaatacaaaattagccaggcgtggtggcaggtgcctgtaatcccagctactcaggaggctgaggcaggagaattgcttgaacctgggaggtggaggttgcggtgagccaagatcgtgccattgcactctagcctggacaacaagagtgaaactctgcctcaaaaaaaaaaaaaaagaaatgaaaaagaaaagaaaacttaaaaagtgcaggaaagaataaactaaatatcatttgtaccctatcatcctctcccctccaccaagctccattggattgaagtatttatgtacaatgttaaggttgtactgatttatacttccagcatccatgtatcccttttttatcctgaactgggattattttaaaagttgtcaattttggtatctccttatggttttatttattatttcttttatttctattgaaattggactttaaaaaattttcaggtggtagtgtgcacctgaagtcctagctactggggaggctgaggcaggagaattgcttgagcccaggagttcaaggctgcagtgagctatgattgcaccacagcactctagcctgggtgacagagcaatgtatatcaaatgtattacatattttttatttattatattatatacatatacatttttattgttgttgttgttttcttgagacagagtttcactcttgttacccaagctggagtgcaatggtgagatctgtgctcactgcaacctctgcctcctgggttcaagtgattctcctgtctcggcctcccgagtagctgggattacaggcacgtgccaccacgcctggataattttttgtatttttttagtagagttggggtttcaccatgttggccaggctggtcttgaactcctgacctcgtgatttgccttgccctcccaaagtgctgggattacaggtgtgagtcaccgtgcccagcattatatatatatatattttaaaaggctgggcgtggtagctcacacctgtaatcacagcattttgggaggctgaggcaggcttgcttgaggccaggagtttgagaccagcctgggcaatgtagtgagtttaaaaaaaattttttttaattttattgctctttatattgtagtgtattttattttattttatttattttgagatggagtctcgctctgtcacccaggctggagtgcaatggcgtgatcttggctcactgcaaccactgcctcccacgttcaagtaattctcctgtctcagccttctgagtagctgggattacaggcacgcaccaccatgccgggttaatttttgtatttttagtagagacgggatttcactacgttggtcaggctggtctcgaactcctgacctcatgatctgcccgcctcggcctcccaaagtgctgggattacaggcgtgagccaccacacctggcctatattaccttttaaataaattgtctcatttcctttgatgaaacagatttttatcatcacacctaatgaaacagcataaaaaatagtttacatggtaatctcataaattagtagatatgcaaacattctaaataaaattttagcaatcagaatatagtataaattttaataaagtataatttttaaaggaattttaaaggtgtggtagctcacacctgtaatcccaaaagtgtgagaggctgaggcgcaagaatcgattgagctctggagttccatacctgggcaacatagcagacctcatctgtactaaaaatagtcccagctactctggaaactgaggcgggaggattgcttgagctcgggagattgagatcagtgctatcatcatgccactgcagtccaccctgggtgacagagtaagaccctgtctcaaaaaagaagaaaaaaagaacatgtactttttaaccaattctgtttttgaacttatttcaaatggtctttcatttttgtttttctgtcacttataaacatcccccactaaagctcaattttccacataaccaataatattattggaaaaaattcatataattatttccacaaatgccagagggaattcttcatggaaactctccctaaaagcaataaaaggttgcctctttaacatgacaaaaaggctctattgaaaaccaaaagtcaaaattacacttaatggagaacatgaattattcctctttaaaataggaacaagacaaggatatcttattactactattcaacgtagctctaaaaattctgacaaagctatttgagaagagaaagaaagatatacataaagaaaaggaagaaataaaatgatcatgttatgcaaatgaaatgaaaagcacctcaaaattactagagataataaatgaaggcatcaaagaaacaagatataatacaaattaatttaggacaattttcctcttgataatagtgcatttctcatttttgttctttctttccatgcatccctttctgtttttattcttaaagcttcatgattttacaatttataagtcctgaacattttgtgttaatcttttctcagatattttaaagattttttaatcgcttttataaatggaattttttttgacattacatgtactttatttttcttaagtgtttaaaataaggcatttcggccaggcacggtcgctcacgcctgtaatcctagcactttgggaggctgaggcctcctcaggtggatcacctgacgtcaggagttcgagatgagcctggccaacatggtgaagccctgtctccactaaaaatacaaaaattagctgggcatggtggcatacacctgtaatcccagctacttgggaggctgaggcaggaaaatcgcttgaacccaggaggcggaggtagcaatgatccgagatcgtgccacggaactccagcttgagcaacagagacagactctgcctcaaaaagaaaaaaaaaaaggcatttcttttgtaatctaattataacatttgcagttatttggaattgtctttcatttctgtttttctgtcacttataaacatcagtcattcacaatgactaatgatagaggtacatcacgtaagtatagatgtaaagtattgtttaagaaagcttaggtatttatttttcgggctttcatgttgttatgctgttcctactcttcttcttcttctgtttttgttttgttttgttttgtttttttgagaaagagtcttgctctgttgtccagactggagtgcagtggtgcaatcttggctcactgcaacctccgcctcccatgttcaagcgattctcctgcctcagcctcctgagtagctgggattacaggcatgcgccaccatgccaggctaatttttgtattcttagtagagacagggttttgccatattggccagggtggtcttgaactctgacctcaggtgatccacctgcctcgggctcctaaagtgctgggactacaggtgtgagccactgggcccagcctgttcccatttttccattgttcttctcctcccctcattttctttttcttttttttttcttctttgagacggagtctcagtctgtcgcccaggctggagtgcagtggcacgacttggctcactgcaacctccgcctcccgggttcacaccattctcctgcctcagcctcccgagtagctgcgactataagcgcctgccaccacgcccggctaaattttttttgtatttttaatagagacggggtttcactatgttggtcaggctggtctcgaacccctgacctcttgatccactcgcctcggcctcccaaagtgctgggattacaggcgtgagccaccgcacccggaccctcctctcattttcttttctggtgtcttgaaccaggtaactgggaggcatattaaggggttttaaatttaggtaataaaacaaatcactagttcctggtatacagcactagatttggttacagaagtttttgctaaccattacctctggtttcaggcagttgtcaggtgactggcctcaggataacatattgctctatgtattgctatgtgacaaaccaccccaaaacttcgtggcttcagcaaaaatatgtgattgttgctcatggttctgtgggttgctggacttaacctgataactctcactcaggatttgcagtgtcagccaatctgaagcctcaactccgctggacagtctgggatctgatgctatcttcaagtggatagtgtcagaattgaattgaattattgacacccagctagtatctgctgcagaactgcttgatgtgtggggacctctcactccaacacacacacacacacacacatattttggtgtcagaaacatcataagtgttgatatttcctatctcaaatagtagccacctttggagactatctactgcacttacatgagttgcaaaactacttgagacagaaccaggccaacgagggatagttgtttttttgtttgtttgtttgctttgttttttgttttgttctgagatggagtttccctcttgttgcccaggctggagtgcaatgatgtgatctcgcctcaccacaacctccacctcctgtgttcaagcgattctcctgcctcagattcctgagtagctgggattacaggcatgcgccaccacgcaaggctaatttttgtattattgatggagatggggtttctccatgttggtcagtggtctcgaactcccgacctcaggtgatctgcttgcctccgcctcccaaagtgctgggattacaggcgtgagccaccgcacctggcccaatagtttttatttatttacttgtttattattttttcttttcttttctttttttcttgaaacagagtctcattctgttgcccaggctggagtgcagttcacggatcactccagcctcaacctcccggctcaagctatccttctgtctcagctccccccaaattcccccacagccgggacaacaggcgtgcatcaccatgcccggctaatttttacaatttttgtatagttaggggtctcagtatattgcccaggctggtctcgaagtcctggactcaagcaatcttctccccttggcctcccaaagtgctgggattacaggcttttttttttttggagacagagtctcgctctgacgcccaggctggagtgcagtggcaagatctcagctcactgcaacctccgcctcctgggttcaaacgattctcctgcttcagcctcccgagtagctggaattacaggtgtccaccaccatgccctgctaatttttgtatttttagtagggatggggtttcaccatgttggccatgctggtctcgaactcctgacctcaggtgatccacctgccttgacctcccgaagtgctgggattataggcgtgagccactgcgcccagcctggatagttttttatttgcagtgtacaatgttttctagtccagtgcttcacaggcctctgtgaatacaaattgcctgcggatcttgttcaaatgcagattctgattcagtggatctgggaaaccatcctcagtcggttcttgactatttaaacaaaaactgggaaacccctgagattcttcatttctgagctcccagatgatgcccatactgctattcaccttttttcccccactttgtaaggctttgcatagagaagttcccctcctggcactaaccattcttctaacagtctgatcgagatataagtcacacactatacaaataaaagtgtacaattcaatgatttttaatatattcatagagttgcaccatcatcaccacaatcaactgtagaacattttcatcatcccaagaagaaatcttgcactgtttcgccatcaacccgccacctccccatccttccctgccttgagcaaccacaacaatctactttctttttctacagatttgcctattctggacacttcatctaaattgaatcatacaatacgcagtcttttgtgactggcttctttcacttaacataatgctttcaaggttcatctgtgccgggctgggtgcagtggctcacgcctgtaatcccagcactttgagaggccaaggcaggtggatcacttgaggtcaggagttcgagaccagcctgaccaacatggtgaaaccctatctctactaaaaatacaaaaactagccaggtgtggtggcacacgcttgtaatcccagctacttgggaggctgaggcaggagaattgcttgaacccgggaggcggaggttgcagtgagtggagatcatgctgttacactccagccagggtgacaagagcaaaactccgtctcaaaaaaaaaaaaaaaaaaaaaggtgtagcatggattagtacttcattaccttttatggctgagtaatattccattgtatggatagaccacattttgtttatctgttcatcagttgatggacatttgggttgtttctactttttggctattatgaataatgctgccatgaatatttgtatgtaagtttttgtgtggacatgtgttttcatttctcttgtgtataaatctggggtagaattgctgggtcacatggtaactctatgtttaaccttttgaggaactgccagattgtttgtaaagtggctgcaccattttgcattcccaccaggagcatgtgagtgttccagcttctcacaacctcactaacacctgctattatctatctttattattatggccatcttagtgggtgttatgtgatatctcattgtggttttaatttgcatttccctgatggctaataatgttgaacatcttttcatatgcttattggcttttttttaattattattttttattttttttctgagacggagtcttactctgtcgcccaggctggagtgcagtggcatgatctcagctcactgcaagttctacctcccaggttcacgccattctcctgcctcagccttccaagtagctgggactacaggtggcgccaccacgcccggcgaattttttgtatttttagtagagacagggtttcaccgtgttagccagtatggtcttgatctcctgacttcgtgatccacccgcctcggcctcccaaagtgctgggattacaggcgtgagccactgcaccggctgtttttataccttctttagaaaaatttctattcagatcctttgttcattttaaaattgggttgcctttttattattgagtcatatcaacaaacttttttaaatggctggttgcagtggctcatgcttgtaatcccagcaccttgggagaacgagacgggcagatcacttgaggtcaggagtttgagatcagcctggccaacacagtgaaaccccgtctctactaaaaatacaaaaaaaattagtcgggtatggtggcatatgcctgtaatcccagctactcaggaagccgaggcaccctaattgtttgaacccgggaggttgaggttgcagtgagctgaaatcacgccactgcactccagtctgggcaacagagtgagaccttgtctcaaaataaatttaaaaaaaaatttttaagaaccacccaaaagctgacttttcattcatttccaaacctgcttttgaggctggactttttaatttcttcctttttaaaatttttaccttagagacagggtctcactgtggcacccaggctggggtgtaatgggaccatcacagctcactgcaacctcaaactcctgggctcaaaaaagtaatcctcccggattaggctcccaaagtgctgggattacaggtgcataccactatacctggccttttgtatttcttagaattgcattttaacattcatatgaggagaacacacacaagtttaaaaacaggcgtttcctctgacctcagctggcttagacagaaggtgaagaaaggttatgttctgcaggatcttttaaataaatggtttttaagaggtgtcagttgccaaaatgcaaataggtgggaaaaaataaaaaaggcgtcagccggcttttaactctttaaacaaaaactgtgaaagtctcatagcctcagcccaggcatccccaggcagaaacaaggactagataaaagcagggagagttgatcattgactcaattaggctgaatcaatcttgtcattgagttcccaaggaaattcaattacaggtcaagtgtaggaagccctgtgattgtggcttaagcagtagaaatgccaggtagtcgatagcagcctggggatggatttgacttcaaagcccctgaatctgtagtgggaagaaaaggcaggagagttgtcgagaggaagaggctcctggagttgaagaaccaaccatcaagaggtttgccccaggccaagggggcactggacagacagggcaccagaaatggcactgccacccccaccagcccaggtacccgacctgacggtagtgactcaccagccagaagggctcatgtgtagaaccttcaagactcagtaggagactccagcaccagcatctccagctaagttgaattgtctgtgtggccagaaactgcactaccaaggccaaggccagagggtggggcagtaggctctgtagggagagcaaaagtcatggtggaggccaagaggcaactctccaggaattccttttccctgaggaactaagtctaagagagtcatggaagtaactgatccctctagcagtgacacaaatattgcaagagagtcttagagtcaaaacccagaagccataaaaagactgatatattccactatgttaaaaacagcaagaaaaagcttttgtatggcaaaaaaaattataactatattgtactgcagttttgtaatatgttaccactgggggcactggactaaggatatatgagatggctccatatttttttttaaccactgtatttgaatctatatttatctcaaaataaaatgtttcattaaacttttatataaaggctgggcgcggtggctcatacctgtaatcccagcaattcgggaggccgaggcgggcggatcacttgaggtcaggagtttgagaccagcctggccaacatggagaaaccctgtctttactaaaaatacaaaaaaaaaaaaaaaattttagctggatgtggtagtgttccctgtaatcccagctactggggaggctgaggcaggagaatcgctggaacttgagaggcagaggttgcagtgagctgaaatcacgccattgcactccagcgtgagcgacagagcgagacatcatctcaaaatagatagatagatagataaataaataaataaagttataaataaaaggcaaaatacataaaaagagctggaataagtacttgcaactcatatcaaagaccaagggctggctgggtatggtggctctcacctgtaatcccagcactttgggaggccgagccaggcagatcacctgaggtcagttcgagaccagcctggccaacatggtgaaaccccgtctctactaaaaatgcaaaaattagctgagtatggtggcagatgcctgtaatctcagctgctcaggggaggctgaggcatgagaatcacttgaacccaggaggcgaaggttgcagtgagccgagattgcgccactgcactccagcctgggggatagagtgagactgtgtctcaaaaacaaacaaacaaacaagcaaaagaccaagggctaatgctgtaatttacaaagagcttctagaaattgagaagaaaaagaccaccaatgcagtttaaaaaaaacacacacaccactgctgggcacggtggctcacgtctgtaatcccagcactttgggaggccgaggtgggaggatcacctgaggtcaggagttcgagaacagcctagccaacatggagaaaccccatctctactaaaaatacaaaattagccaggcgtggtggcacatgcctgtaatcccagctactcaggaggctgaggcaggagaattgcttgaacccaggaagcagaggttgtggtgagccaagattgcaccattccactccagcctgggcaaccagagcaaaactccatctaaaaaaaaaaaaaaaaaaactacacacaccaccaatccaaaacagaaagagcaaaggacataaagagatagtttacacaccaaaaatataaaaagtctttaaattcatgaaaagaagttcaacctttctcataaaacaaatgcaaattaaaactatagtgagacaccatttttttctaccaaacagattggtaaaaatccccaaatcctaaagttggacaatgtactctgttggtgaagctttttttgttttgtttttgagacggagtatcgctctgttgcccaggctggggtgcagtggtgcgacctgggctcactgcaagctctgcctcccagattcaggccattctcctgcctcagcctcccgagtagctgggactataggtgcccgccaccatgcccggctaattttttgtgtttttagtagagacagggtttcaccatgttagccaggatggtctcgatctcctgacctcatgatccacttgcctcggcctcccaaagtgctgggattacaggcgtgagccaccacgcctggcctggtgaagctttaagggaacagagactctttgcatttatgctttaacccagcatatggggcacatatataagatatgttcatgaaataccaatccatgcataaaaatgaaatgacatagcacaagggtattaattgagacactgtgatagcaaaagagtggaaacaattcaagtgtctagtaatggggacttactgaataatttatggtccagccacataatggattaaatataatattggctataagaaagaaagaggaagatgtctatgaacttatgtagaaaaggttcctgatttattattgctaagtgaaaaaagcacttttcagaacagtaaagcatatgctgccacttagggaagaaaaaatggtcagaatacatctctgtaaaaatgttacctcaggtggaaggagagaggggaaaagtgaaggaggcaagggtggaaatgaggtttctctgtaatgctgttgctgaaatgtcaggggatcagtttactgcacagaaagccaatcactgagacaacaagtattgccagagaagaaggctataatcaggcactgccaccaaggagatgggagatcagtctcaaatctatctccctggctggctaaaattatggatttatataatagggaagaaatgtaaccatgtgtgggaaaacaggaattagggaggggttaggaagggaagttggtcaacaagaagcaggtggtctgttaggcaaccatgatgggtgaggagtctggcatctcattgtccagatgtcatgatctggtaactttcagctccttgatactatctgggaggcctgatggttggcttcctaagaaaggaactcagataagataaatgtaactttctcaagttttatgactgggaggatcatttttatgtttattcaatgaaaccataaacatcagttccaagggacagctgggccagtttcaatgcctttttgtatagttatgactcttaatcctataagtttatttcccaccttgaaagaattcccaagacttagagatgctccacagagaagggtagaatggagcttgtcacctgtcctttgggaaggtagacatgtgcaggaactcagggatccatgcttgggatagtagaacctggccatattagggaaggaagtgaccctaaaaattatccagttttggccaagtgtggtggctcacgccagtaatcccagcactttgggatccacccagctaaggtggatggatcacttaaggtcaggagttccagaccagcttggttaacatggtgaaaccacatctctatttaaaaaaaaaatacaaaaattagccaagcgtggtggcgcacgcctataatcctagctactctggaggctaaggcatgagaattgcttgaacctgggaagcagaggttgcagtgagccaagattgcaccaatgcactccagcctgggtgacagagcaagactgtatctcaaaaaaaaaaaaaaaaaatccagttctgtattttcatttgtttacatagttgagggaaactaagatgggagtggagaattaattcccttgcctaaggacttatagtgaatagtgtgaaaataatctctggagcccagatttcttcaatttctaagaaaagtagctcttccgaagtacgtctttattgctgaagaggcagcaccatttgggtgagggaagtggttgctttttgtgattatagccatccagaagcctcgtaccctccggacaactgatcaccctgtagccgtgtgggttacaggttctgcatgagatttagctccagcaccttggtcatttaggactcgcggggccagtgagggcccataacaccgaggtgatccttccagtcccagaaaggctggggaggcctatgaagccagagaagacagttcatcccctgagggaaaagggggaagagagcactcctcagggaagtaggggaagaagcaagactggcaaggtaaccaagggctacgcattttaaataatttaaacctcttttttttttttttgagacagagtcttgctctgttgccaggctgaagtgcagtggcgcgatctcagttcactgcgatctctgcctcccgggttcaaacaattcccctgcctcagcctcctgagaagctggaactacaggtgtgcaccaccacgccccagctaattttttgcattttggtacagatggggtttcaccacgttggcttggatggtctggatctcctgatcttgtgatccgcctgccttggcctcccaaagtgctaggattacaggcatgagccactgtgcccggccattaaaccactcttaatggaaatatttctaaaagccttccttccaaagcagagcccactgaacgtaatttaactttcccagtgactcagtgccatcattataaaagtttccaggactgtggcacaggcgacagtccccagggactcctgcaggaggaaggtaaggcctttgcccctcacactaatagattgctcttctttctgaggtcttgcatttgctttgagagcctgtctgtcctctctttcagctgccatccctgtgggctggcaacgcctgagtatcactgaggatttcaagagtgagaaagcccctcctctgtgtaaaacctactgttctttgagggtctttctgagtctcaaactccacggttgtctccatttcccttgattaggattcattgctgacctcacggcgggctcagagcagatgcaagccccattcattcaagacttctgtctcctactctcctcctactacttgcccccaagctccccaccattacacctgtctcttcccaacttttatgctgtggcctctggaatcctgcccaaggcaaacaaagttctccacatatagtaaaacattaattctatatttagccaagtgaagcattcacatagttagaatcatcaaatgtacttaaaggttcaaggtgaaaccagccgctctaccacaccacacccctccagcgccagcccaccttgcacagggaagtctcttttagttgctacttctggtattttctttttcttttcttgtttgtttgtttgttcgtgttttgtttttgagacagagtcttgccctgtcgccaggatggagtgcagtggcacaatcttggttcactgcaacctccgcctcctggcttcaagcgactctcctgcctcagcctcccaagtagttgggattacaggcacgcaccagcactcccagctaatttttgtgtttttatagagacagggtttagtcatgttggtcaggctggtcttgaactcctgacctcaggagatacgcctgcttcagcctcccaaagtgatgggattacaagtgtgagccatcaggccccgactgttttttgaattttaaataataagcaagagctgctattttttatttgtccattttaaaaatgatctgtagacttcctaacatgacacgggcaatttcttgtacacatacatgcaagcaagcacacgtgtacacaacacagatttccctctcctttttcttccagtttagttttaattttcaggtaagtcaatattacatgtttacacgatttctactatcgcgtttatatattcagtagttacgtgttctgtggttgtgtttcttttgtttttcatcatttttagtttctaggagttagtaattgcttagtaattactaggcaatttgctcagtttgcttggttgtctatgtacctatcattagttctttcccacatcctcctacaacctctcattataattttccacatggtaaaacacatcaaataataaattgtattctggctgggcaaagtggcacattcttgtagtcccagctacctgggaagatctcttgagtccagaagttccaggccagcctgggcaatatagcaagaccctgtctctacaaaaaatttttaaaattagccaagcatggggccgggcgcagtggctcaggcctgtaatcccagcactttgggaggccgaggtgggcagatcacaatgtcaggaaatcagaccatcctggctaacacggtgaaaccccgtgtctactaaaaatacaaaaaaaaattggtcgggcatggtggtgggcacctgtagttccagctattcgggaggttgaggcaggagaatggcgtgaacctgggaggcggagcttgcagtgagccaagatcgtgccactgcactccagccggggcaacagagtgagactctgtctcaaaaaaaaaaaaaaaaaattagccaagcttggtggtgcacacctgtagtcccagctacttgggaggctgaggtgggaggttagcttaagcccagcagtttgaggctgcaatgagctatgattgtgccactgcactccagcctgggcaccactgtagtctagcctgagcgacaaagcaagacctcgtctctttaaaaaaaaaaaaaacctgctttctggagttctctgtcatctccaatctgaaagtttctgttgtctaggtcttttgtacacatattattttaggatttcttttcgtcatcgttgcagaaattcctttagcttctggattggatcgcctgtttcttaaattcgtatcttcttctttcttggtttaatctctggttttggtagggcacattctccactagctacctgggaaacaatatttgtaggtaattattaaaaatcattttattggccagatgtggtgactcatgcctgtaatcccagcactttgggaagccaaggcaggcagattgcttgagtgcaggggttcaagaccagcctgggcaacatggcaaaaccccatcactatttaaaaaaatcattttattgaagtgtaatttacccactgtaagatgcacccgttttaagtgtacattttgacgggttttgatgatttttttttttttttgagatggagtctcacactgtcgcctaggctggagtgcagtggcgcgatctcggctcactgcaagctccgcctcccgggttcatgccattctcctgcctgagcctcccaagtagctgggactacaggtgcccggcaccacaccctgctaattgtttgtatttttagtagagacggggtttcactgtgttagccaggatggtctcgatctcctgaccttgtgatccgcctgcctcggcctcccaaagtgctgggactacaggggtgagccaccgtgcctggctgggttttgataaattttatgcccctgagtaacaaccaccacaatgaagatatgggacttttccattgctccaaaaaaatcagggcgctaccccaatcaatcttcacctctactccatccccagctccagacaaactttctgttttttgttactagagattagataagattagtcttttctagggttttatctaaatgaaatcacacagctgtcttttgagtctggcttctttcactcagcatgacgtttctgagattaatccatattgttgtatgtatcaataattcattcatttttaacaacatctttgttgagatataattgacatacaataaactgcacataatcaaagtgtaccatctgataaattttgacatatatacatgcccatgaacctatcaccattactcagtataattattctgagattcgttaatgttgttacatgtatcaatagttcattcttttttgttgccaagtagcactccagtccagtatatatagatacaccacagtttatttatccattcatgtatttaaacattggattgtttccagtttcatctattacaagtaaaactgctatgaacattctttgtgcagagaaagctactatgtcctttgatgtctttgtatggacatatattttcttttctcttggataaatacctaagagtaaaactgttgaattaatggtagctgtatgtctaatatgttaaactttttttgttgttgtttttttgagacagggtctcgctctgtggctcaggctggggtacagtggtgcaatcacagctaattgcagcctcgaccactccggctcaagtgatcctcccacctcagcctctctagtagctgggactacaggcacaagccaccacaccagctaatttttgtattctttgcagagatggggtttcaccatgttgcccatggctggtctcaacctcccaggctcaagtgatccaccctcctcggcctcccaaagggctggattacaggtgtgagccaccgcatccaacctgtttaactttttttttttttgagatggagtcttgccttgttgcccaggctggagtgcagtggcacaatctcggctcactgcaacccccgcctcccgggttcaagtgattctcctacctcagcctcctaagtagctgggattacaggagtgtgccaccatgcccagccaatttttgtatttttagtagaggcggggtttcaccatgttggccaggctggtctctaactcctgacctccagtgattctcccacctcggcctcccaaagtgctgagattataggtgtgagctactgcgcccagccatagcctgtttaacttttaaagaagctgtcaaactgtttgccaaactggttgggccattttattttcctacaagcaatgaatgagaattccagttgctccatatcctctctaacacttggttttgtcagacttttaaattttagctattgtgataggtatagtgttattatctgtgtgtggtttgattttgcatttccctgttgactaatgatgttgaacattttttcatgtggttactgaccattcatatcttcttttgtgaggaaagagtctattcaaatgttttgccaattgtttatttgggctgtttgccttcttattattgagttgtaagagttatttatatattctggatacaagcctttgttaaatatacatataaaaatattttctggtggggcacagtggctcacgcctataatcccagcactttgggaggcttcaggcaggcagattgcttgagctgaggagttcgagaccagcctaggaaatatggtaaaacctcgtctccactaaaaatcccagaaaaattacccagacatggcagcgcgtgcctgtagtcccagctactccagaggctgagttgggaggataacttgagaccaggagttcaaggctgcagtgagctgtgatcacaccactgcactccagcctgggtgacaaagtgagacctcgtctcaaagaataaaaaaattagtaatattttatattttctccctgttcctggcttgtcgtttcattttctttttcttttttttttttgtgacaggttcttactctgtcacccaggcgggggtgcagtggcacaatcatggctcactacagcctcagtcttccgaggtttaggtgattctctcacctcagactacaggttcctgctaccacaccagctaatttttgtatttttggtagaaacaggggttttgccatgttggccaggctagtctcaaactcctgggctcaagtgatcctcctcagcctctcaaaatgctaggattacagctgctagccaccacgcttgcattttcttaatggtgtcttttgaagagcagaagtttttcattttgataaagtacattttaccagatttttttaaatggctcatgcttttctttgttgttctgtttatgaatattttgcctacctccataatgaagaagcagtctcacaatgtaatttaggatgggggcttgtggtggaggtggtggtattagttctgccactggaggaactggagactccaggtatcagcctgatctccagaagagctggacactgaaggtcagccgtgttgtaactgcccagtgggttcaccttgcccgctgcctagacacagacaatttatcaagactgggaattgtaatagagaaagagtaattcactcagagccggctgtgcaggagacccgagttttattatttactcatatcagtctccctgcctttggggatcagagtttttaaggacaatttggtgggtaggaggcagccagtgagtcacgaatgctgactagttgggtcagagatgaaatcataggaagtggaagctgtcttacgctgagttagttccagggcgggggccataggatcagataagtcagtttatcgatctaggtggtgccagctgatccatcgagtgcagggtctgcaaaatatctcaagcactgatcttagggttcacaatagtgatgttattcccaggggcaatttagggagggtcagaatcttgtggcctccagttgcatgactcctaaaccatgatttctaatcttttggctaatttgctagtcctacaaagtgcctagtaaaacagaaggcatgtaaatctgcccttctgccaatattgattgatcttactaaatggcttgaccaataaaatggcctaagcccacaaaggttgttaatttgaaacagtgtagaatacttgatggacacagacagattaacactttcattaatgccctgtcaggagctggcgtgctggtgtagacagagtctctgtacaatagccctgtgtggaatgcagacttgggctgtagcaaaagcgccacccagcagtgaccactgggattttgaaccaaaaaatttccacttgagagacaattaactagcttgctattgaacattaattgaaatggccactatgactaaagacataaaataatcttgaaacctgacagagccataatgtcgcgggcaattttggagacacatggccaggcgtggtggctcacgcctgtaatcccagcactttgggaggccgaggtgggcagaatcacttgaggtcaggagttcgagaccagcctggccaacatggagaaaccctgtctctactaaaaatacaaaaaaaaaaaaaaaaaaaaaaagtaaaaataaaaataagcaggccatagtggcgggcgcctgtaatcccagctactcaggaggctgaggcaggagaatcacttgaacctgggaggcggaggttgcagtgagccaagatggcgccattacacttcagcctggcaacagagcgagactccctctaaaaaaataaataaataaaattgaagaaacactgtaatggagcggaaagtgcccagaagagctccataacaaatggaaatggtgtatacaggaacatgctaccagggagatgtgaggattactcatgagcaggtagtctctttacccctagaattgtagctgcccagcgggttcaccttgcccttgcctagacagagctgatttatcaagacaagagaattgcaatagagaaagaggagtttttgcagagctggctgtgtgggagactggagttttattattactcaaatcagtctccctgagcattcgggaatcagagtttttaaggataatttggtgggtgtggggcccgcgggtcaagagtgctgattggttggatgggggatgaaaccgtagggagtccaggctgttctcttgtgctgagtcagttctttggtggggaccgtaagattagatgagctagtttaccgaaatatctcaagcactgatcgtaggttttacaacggtgatatccccaggagcaatttggggagggtcagaatcttatagccaccagctgaattcctcctaaaccataatttctgatcttttggctaatttgttagtcttacaaaggcagtctagtccccaggcaagaagggggtttgttttgggaaagggatgttatcatctttgttttaaactataaactaaaaaataagttccttccagaattagtctggcctctgccctggaatgaacaagcacaggttggaggttagaagcaagatggagttggttaggtcagatctctttcaccatctcagttataattgtttttttcaatctcactctatcatccaggctggagtgcagtggagcgatcttggctcagtgcaacctctgcctcccggcttcaagcgactgtcctacctcagcctcctgagtagctggcatgcgccaccatgcccagctaatgtttttgtatttttagtagagacggggtttaaccatgttggtcgggctggtctcaaactcctgacctcaaataatctgtctgccttggccctcctaaagtgctgggattacaggcatgagccaccgcacctggcctcagttacaattttgcaatggcggtttcagaatccactttggaacctcctgggatgctgctgggtgctatagccacttgagtcacttaagcggtgccctaggaacagctgtctattgaccaacaaaaagcttcttgatttgtggatggcagttcccaggtgaacagatagcatcctgtttggaagaccaccacgctaattaaagaagataaaaacaaatcagctgtgtgggctgaagtgcatgctgtttgactccctgtttggggtgtgtttttttgttttttgtttttgtttttgtttttgagatggagtctcgctctgtcacccaggctggagcgcagtggtgtgatctcagctcaacctccgcctccaggttcaagtgattctcctgcctcagcctcccgaggagctgggactagaggcatgcaccaccacacctggctgattttgtatttttagtagagatggggtttctccacgttggtcaggctggtctcgaactcccgacctcaggtgatctgcccgcctcggcctcccaaagtgctgggtgagccaccacgcctggcccctgtttgggtttttaccagttcatgggtatagctaatggccaggccatggcatccggtagaacaatggtgactggactattgaagggatcctcatatggggcatgggcccatggaaaccaccatgggaatttaagggatgtattaaaatcagacataacaatgatcctcagaagtagccccttctaggactggaaggagattggaatctgcaatatccttgtttgaggtggccacctcaggtggcctgaggtggccattcatttaatggacacgggggacccgtagccatgcagacataagctggatctagacatgttcctcttgcaccctctcaggcacaaaatgcctacgagagtcatactgtctatcaacaagagagacagagactgcagataactatggagaaggtctccacggagaaggtcccacatatagctggcaaactggactgatgctgccagccctggggggctacaaatggttcctaaaaggaacagacactctgggactaggctttgcattcccagcagtagatgcaaatgctcaaaatactataaaagaattgaaacagaaaatactgcaccaatttggactgttgagtcacatttcttcagaccaaggaacacattttcatcctcagagaaatgtgttccatccaaggaacacattttaaacctcaaatcatggtttgataggaactggaacagacatttgaaacatttgctgttcaaaatcaggggagataaaggaataaaaggctggcttacatgccttcatgtttacactcaacatgagggagtcaaggaaggcccccactagacagattaccccaccttgagaccttgtctctaccaaaaacataaacaaaaaactattttaaaactaactggaatatggtggcatgcacccgtagtcctatctacttgggagactgagaggcaggaggacggcttgagcgtgggaagttgaggttgcagtgagctgtgattgtatcgctgcactccagcctgggtgacagagtgagaccatgtctcaaaaaataaataaataaataaataaataagtggaaagtttagatataactgaagggaaggagaaatagtagctgagtataaagaatgagtgggttacaatgaggggacatcacatattacatcaatattacattgatgccttgagaggggctcagagcaagagattatattttcccttagcttaatcatacaggatgggccaggtgcggtggctcatgcctgtaatcccagcattttgggaggccaaggcaggtggatcacctgaggtcaggagttcgagatcagcctggccaacatggtgaaaccccgtctctactaaaaatacaaaaattagacgggtgtggtggcggcgggtgcctgtaatcccagctactcgggaggctgaggcaggagaatcaaaactccatctcaaaaaaaaaagaaattatacaggatgtctgaaagggtgaagccatctaatgccaagatcactcctgcttttgaaacctgacaaagccaaaaggaagtctgcaagccctagtggcatcgctctgggagacattctggtcatatgctatgattactccagatggacgggactccctgttaatgtctaagactctggtaatatgccattatcttttgactattatttttcaggttatatctacagccatattgtgatatagcgttaacactcaccttgttgctaagattcaactatcttacataaacaggtcatgtgataatactgatattgatgatcaaatgtattgggaaaatggccctaaggaagaactggatttaactaaccaaagctaatttctatgctaccatgctctgagaagcccaagccatggaatcactacatagagaagtacagaggtcctcaactcacagccctcaccaacttgctggaggatagcaacaccagctaccagccccataccccggccagcatcacgtggagcagggccgcctggtgaagccactgggtccacagaatcatgaagttacaactggcattgcttcaagccatgcaacattggggagtattttatttcctaccagtaaatagacaaaacacctgatatttccaatccctcaggcttcccggattctgctggtttttgatgtccacccccacccgccagcgcttggatttgagctccctctgctctgccaagtcagtcatcactctccactctccccctgctttccagaatgctgagttctcctgtctgtgctcatttcctcccccgctcttcttgtccttgtgggtttatgccttttttatccctttattgtaattttagtggggtttggggagggtgaagagataaatagatctgcttaatccgtcctgtttaattcagtttctcctgcattcttaacatcctattcacaggattctccctccacctccttctttactcaagatctggctctgctcacaggctcctcccagacgccacacaccccagagttgagaggtttggggtcagtgtcctcattcccagtggttccttgagggccatgccactcacctcttccaccccgcccccatccctggtgaatgccatcattcactgagcagtgggcacaccctcttctccatcagctcccagtcttctcattctggtgacttcaccatccccaagatcaatccagccatcagcttggcctctgagcgccccgaactcctcgtgtcacatgcttctcctctacctccttcagccatgacgtcacaggaccaaacccccactgtgtcatctcccagagctgcctcccctctgaagtcactaattcaggctgcctacccagcacaacggccagctaagaggtcccttctcctgtgtggagctgatcccgtagtctatgctctgcatcccttgtcgcgcccccacctcccgatggtgcattccatctgccttacgttgtcaccttctccttctctgtacggtttattttactttattttattctatttggagacagagtctcgctctgtcgcccaggctggagtacaatggcacgatctcagctcactgcaatctccgcctcccaggttcaagcgattctcctgcctcagcctcctgggtagctgggattacaggcacctgcaccacacctggctaatttttagtagagatggggtttcaccatgttgtccaggctgaactcaaactcccgacctcagatgatctgcccacctcagtctcccaaagcgcggagattacaggtgtgagcctccacacccggcctccttctctgtatgttttctgagggcagcaccagcacccattcacccacttccagcagcagagcctgattttgcctctagacctctccctgtccccctcagtccttgtcatctaggttaaactggctacaccctcagcctggtgtgagccaggccctgccaatccatcaccttgcctggtgactgagatggactcgggagtggacatccgaccaaaggcaggccagttagtcaagagactcttggatttttgtggaagccattaggtaagtggggtctttgctggttggatttaagtctgggaggatgaaggacagcactgttgcagccgttttgccacaatgaggggagggcctttgggaggataaagcccagcatagaagagagcaaagcctgaggcctgcggcatctatgcctgaatccagctgtgcctgaaggtagcgctgtagctcaggtttccagttacaagaacccattcaacctttctgccttagcctggttagtattgtggtcccactgaacgtaccattcaggagaatcacgtttaaaagtggcacaagacaaagacatgaatctgaataccttcagacatagtctacagctccccctggtggaaaacattgttttttagagtccagctactaggccttaatttttatccaccacgtgtcccaatagtctgtatatatctaggtcaatttagaacatcttttctagttcaaaaagcatgtaattgctgctatttataatcctgatcacagcccattccggtaatactttgtaattcagaactataatccccaacgaaacatgtcccagaatcaagcagtgaatgtagaatgtgctagatcattaggactcttttttttttctttttgagatagggtctcgctctattgctcaggctggagtgcagtggtgtgatcaggttcactgccgtctcgacctcctgggttcaatgatcctcccgccttggcctcccaaaatgctggtgattacaggcaggaaccactgtgcccagccaggaatcaatgtttataattatcaaaaaagagacaagaagaaaggaggaaacacaaaaccataatgcggaagaatgttaaaatccggtcaagtataacttcattgatttctggtttcaaggattgtaccccacaattgtctcttttctccccacacgtcatggaaatgatcagaaagaagtaattgtatgacagtttaaaaaatgaactgttccgacctggagcggtggctcacgcctgtaatcccagcactttgggaggccgaggtgggtgatcacctgaggtcaggagttcgagaccagcctgaccaacatggtgaaacctcgtctctactgaaaaaaaaaaatgcaaaattagccgggcatgctagcgcatggcggaggttgcagtgagccgaaatcgcgctattgcactccagcatgggtaacaagagcgaaactcggtctcggaaaaaaaaaaatctgttccagcaaatgataaagctggagagaatgttactaacagaactgaaaatctgaggaatttgaggaaatgtgttcttcgttgagagcaaagtcacgcagtgctgagctgagcacccagcgcaaaggaggggctccctaaaggaaggtggaaaggtctccccagtagagctccgcccagccccagctctaagcagcgggccccgggcatcagggtttcagggctgaggaatgtccagcgccgcccgatcgcgcctcgcttcctccatcactaaaccaccgggggactgactgcccgaggctggtgcagaagcgggtgcggaagcgggagagggaacgcgcgtggcgctccagccgccaccccaaccctgccacttccgcagctgcccgggcgccgctgcacccggaccactctgcggtctacccgctgcggccagaagaagagagactccggggagggtggccctgccgcaccctggccttcacagagcagggggcggaagagcccaggtgccctcggtgcctgcgcaacctgagccccggccgcctcgcgccttatccttggggctccccctggcggctaagccggtccctgcagggaaacgtgcccgttgtctcatctgcatccacttagcaccaagacggggtagctgagggggtcggcggaagaggagaggggaggcagcaaaagatgatccatgcggacgaccagggagcccacaccagcctccaagcgcgtcagcctccagctccactccccagggtgaagagtcaacggacaatcaccccgaagtaaggccctaccgcctcctgaaaaaggtggttaaagaagggcaatccgctaaagaatagagtacacgggccgggcgcggtggctaacgcctgtaatcccagcactttgggaggccgaggcgggcggatcacgaggtcaagagatcgagagcatcctggcgaacacggtgaaaccccgtctctactaaaaatacaaaaaatgagccgggcttggtggcgggcgcctgtagtcccagctactcgggaggctgaggcaggagaatggcgtgaacccgggaggcggagcttgcagtgagccgagatagcgccactgcactccagcctgggcggcagagcgagactccgtctcaaaaacaaaaaacaaacaaacaaacaaacaaacggaatggagtacacgaattataagtacaagaatgtacttaaaatattcaaattaataccctcaataacattaatgccagaatcttgcattcacaataaaaaacttggtgtccaaaatgtggtacatccatgcaatggagtattattcagcctctaacaggaatgaaattcttacacatgctataatgtgggtggaccctgaaaacattaccctgagtgaaataagccaaatacggaaggacaaatcctgtatgattccacctctacgaggtacttagaataggtaaattcatacaggagaaagtagactagaggggccgtcgttgtttaatgggtacagagcttttgttggagatggtgaagagtttcaggtgtagtggtgatggttacacaaaaattttggctgtacttaatgccactaaactgtacacttaaaaatggctaaaatgaggccgggcgcggtggctcacggctgtaatccgagcactctgggaggccgaggcgggtggatcacctgaggtcaggagttcgagaccagcctggccaatatggcgaaaccccgtctctactaaaaatacaaaaattagcacgtgcctgtaatcccagtctgaaggtattcagattcatgtctttgtcttgtgccacttttaaacgtgattctcctgaatggtacgttcagtaggaccacaatgctaaccaggctaaggcagaaaggttgaatgggttcttgtaactggaaacctgagctacagcgctaccttcaggcacagctggattcaggcatagacgccgcaggcctcaggctttgctctcttctatgctgggctttatcctcccaaaggccctcccctcattgtggcaaaacggctgcaacagtgctgtccttcatcctcccagacttaaatccaaccagcaaagaccccacttacctaatggcttccacaaaaatccaagaattgagtctctttttatttatttatttatttttttgagacggagtttcactcctttgtccaggctggagtgcaatggcaggatcttggctcactgcaacctccgcctcccaggttcaagggattctcccgcctcagcctcctgagtagctgggactacaggcacccgccacaatgcccggctgattttttgtatttttagtagagatggagtttcaccatgttgaccaggctggtcttgaacttctggcctcaggtgatccacccgcctaggcctcccgaagtgctgggattacaggtatgagccactgcacccggccaagaattgagtctcttgactaactggcctgcttttggtcggatgtccactcccgagcccatcacagtcaccaggcaaggtgatggattggcagggcctggctcacaccaggctgagggtgtagccagtttaacctagatgacaaggactgtagctgggactacaggtgcaggccaccacgcccggctaattttttgtattttagtagaaatgggatttcaccatgttggccaggatggtctcgatctcctgaccttgtgatccacccacttcggcctcccaaagtgctgggattacaggcatgagccactgcacccagcctgttgtggccatctttagaaaatacaatacgccacagcctgccctctgaccacaactcacattccaaccacatgaaaacacaaggctcttcccattatggcatcaactcaaggtctagcacttctgcatccaagttgggtccagaggcagctgagtctccacaggtgattcaccaactttctgcagctctcagggtacctgttctggattaaaaatgagatcatcccagctctgtggggtggtcaagagcttccctggaatgtggcatcgtaacattccactagcactccctgagcaccttacatgcccagctccactgtgtggacccatggaaaacctggatgaacaggaaagacccagaatttgccaatgcaagctttggtgtaggctgtcctctgtgactgtcactggttccactgatgcagggcaggtgagccccaaaattgaggcttagccagggagggttcttggcttcacccaagaaagaattcaagggcaagctggtggcaaggggtggatatgcaacaatttctagaaaaaggttggtaacttctgggttgttgagttgttgccatggaaaggggtagtaacttctgggtgttgccatggcaatggtaaactgacatggcactggtgggcgtgtcttatggagtggtgttctcacctcttccgtgtttcagctagtcttcaatctggtccagagtccaagccccacctctggagtcaagtcctgcctcctatatcactgctacttggatgtcatccccaatcgtggaaccttcttcaggttccttaactttactacattcaactgtaaaatctcatagctacattccatggtgacttcaggtttttgaacatatgctgataaatacttatttggagggatcacacagtggtcctgtcagccagcctcactttccattgtggttacatcctcatctgtagagcaaggcttcttaccatttttttggaatatttatcttatgagaaatgggaatactgaaagcataactattaagacttcatataattgagacaaatagaaaagatttacctacaacagggtgttcactggctttaagctaaaggacctggcagactgcgttctagttgttaaggaaagaaacaaaatacacaaaatcctgggaatgcatcattggaagttgagcctaaaatgtactgtattattggggactttatattaaatacatttgatgacagatttaccctctttgggaagagaaccttcctgatagtctgtggttcccactctcctatcaggcccgagtctgcgtttttttgtttgttttgtcttcgttttgagatggagtttcgctcttgttgcccaggctggagtgcagtggcacgatgtcggctcactgcaacctctgcttcccgggttcaagggattctcctgcctcagcctccccagtagctgggactacaggcacatgccaccacgcccggctaattgtttgtatttttagtagagacgtgatttcaccgtgttagccaagatggtctcgatctcttcacctcgtgatccgcccgcctcggcctctcaaagtgctgggattataggcaacagcctccccgcccggccgagcctgcgtttttaggtgtaccatgcagcatacacgaaagggatgaaagacccgcgtatccattggccctgactgctgtgacggattaccacaaacttggtggctgaaacaacacacgtttactctcttacagttctggaagtcagaagtccgaattcagtttcactgggcccaaatccggttgttggcggggccttgctgtctctgcagaatccatttcccatccatttcccggagtcacatttcttgcgtcccttggctcctgtcctccagcagcgcagcatcctgcttcagtgttgctttgctttgtgtgtcgaatctccctcttataaggacgcttgtgattacattgagggcccacccagataatccaggataatctttccatctcaagatccttacattcaaatggcgaaacattattgaataaaatgaagtaaatctatatctaagaacatggaaaacgtccaagacatgtaataaagggaaaaatagaaactaatactcgacaaccagttagaagatataatagaagaaaaggacctacaagagcaatataaaagataaaatgctttttaataaacttaacacagttcacaggttctggggatttggaaataaaagaaaaaaaaagaaaagaaaaatacaatgataaaaaagaaaagagtaacaagaaatacatcaaactcacttaaagaaaaggtaaaaacactacagaagggtacaaaagtaggcttcaacaaatagtagtcttgcccagaaagactcaacatcctaaaatgtaaatcttccataaattaatttataagtttaacacaataacaaagaaagtgccaatgactttttaaaaattaggaagatgattaaaaagacaatataaaaaattaatgcataagaattatcaggaaaattctggaaaggaggagcaatgaggcagaggacggagagtagctctgtaaattaattaaaaatattataatacttcagtaatgaaagtagtatagtagtggttcatattagacagactgaccaagggaacagaacagaaaatccagaaatacatgcagatacattcaggattgttctttatgatgatatgaggagaaatgaattattcagtgaatggtaatgggacagctgggaaccaggcagatgaaaataaaattggatccacaccttactcctcacatcaggataaattccaaaggggtcacagatttaaatgtaaacgtgaaactgtaagtccttgaagaatgaagaaaacattggagaatgtgtttgtagcctttgcttttctgatagtgatttaaaatccaaacggcatttaaaaattttaaaagactgcatttgaaaatgtacttggcaaaaacacactcacattataagcaaagagtagacacatcaactgggatttttttttcaaatcatattacaaatgtgtattctcctaacatataaagagatctaaaaaatgataagaaaaagaccaataacccaatagaaaagtgagcaaaagatataaacagacagttctcaaaaaagatatgcaaaaggcctgtaaacatgaaaatatgttcagcctcactcagaagagaaacacaaatttaaactataccatgatacttttttttcccttggatgccatttttctttttcaaatatcaaattggagaaattaaaaacacactctgaatccaggctgtgggcaacaagacactctaagtcattgctggtactagtgtaaattggcataatccctagaggggacaatttggcaacatctctccaaattacagtgcatttacacaggcaatttgcctgtagatgtacttagatatatgcaaagtgaggcttgtacaaggtattcatcggagcagcaatagcaaagagtaaccaggttacagttctgcgattcaatggaatctatgcagctatgatcagctctctatgaaacaagaaacaagacctccaagatattgttgaaataaaatagcaaggtacagaacagtgttatcttttatgtaaaaaggggactagaagaaaatagattcttattgcttgcgtatgcccaaggagcgccacaaaacgtatgagaatctacctgtggctctccctttgggggaagtgggctgacaggggacacacgtggtagggagcattttcactgtatattcttttttgtttattttatttttgaacgatgtaattgtattatattttcataaaacaaatataaaatattttaaggagggaagcagattgtaaaatagtacataaaattatctattttcggctgggcgtggtggctcacacctgtaatcccagcactttaggaggccgaggcaggtggatcacaaggtcaagagatcgagaccatcctggccaacatggtgaaaccccgtctctactaaaaatacaaaaaaaaattagctgggcgtggtggcgcacacctgtagttccagctacttgagaggctgaggcaggagaattgcttgaacccgggaggcagaggttgcagtgagccaagatcgcaccactgcactccagcctggtgacacagtgagactgcatgtcaaaaaaaaaaaaaagttatctattttctcatatatgcatttttaaaagctatttacagtggttatcttcaaaagtcttttatttttgcttacacatttttgcatactttattacagatgtgagccactgtgcccaacccgttttaacatttaatagtgaaaaaatgatatatttctgtttcctccacactattctttaactattacaaactgtagtttaatggaatcctgatttttaccctctagtttggattcagtgtttctaacttgaagtttttttgttttttttgttttgttttgtttttttgaccagacccccaggacttgtttccttctgtgagattcaggccaaattggtttcaaaagttgttttgcttcaaggaatagtttttccttatctactgctgcagtgattccacaaacagaaacttctaattccttctgtcaactcctccaaatttcgtgactttatggggggcagggaagggactaaaaatctcagaagaaagagctttataccctttgcctctagacagagcaaaaccaagaccttccagagagggagcgccacctgcagctgaggctatttatagtacaggagttggatttaaatataattctgtcctctggtaactccagccagctgctactttaagatttggcgccgccctttatgtaagagggcatgttttgtttcagtacctttcagatggaatcgaaatttagcagtaagcaacaaacaagctctggtgtgggccactggaagtgagaagcagtgtggtggcaggaggctggctgtgcaaccttggcgtgaggactagaatggatttaaaatagtccactccttgagtataaaatggtacaggctctgcagaaaacagtgtgtcagttcctgaaacaatcaagcatagaattatatgatccaggccaggcacggtggctcacacctgtaatctcagcactttgggaggccaaggtgggtggattgcttgaggtcaggagttcgagaccagcctggccaacatggtgaaaccccgtctctaccaaaaatacaaaaattagcctggtgtggtggcgcctgcctgtagtcccagctactcgggaggctgaggcaggagaatcacttggacctggaagacggaggctgcagtgagcagaggtcaagccactgccttccagcctgggtgacagagtgaaaccctgccacaaaaaataaaattaaataaaattaaatatttatttgaaaaaagaattatatgatccagcaatcccacttctaggtgtatacccaaaacaactgaaggaagggactcagagaccaagaggtggaagcaagccaagtgtccacagaagaatgaatgggtaaataaaatgtggtatatactgtacatacaatggaatattatttaaccttaaaaaggagtgaggtggggcttggtggctcacacctgtaatcccagcactttcggaggccaaggcaagaggatcacctgaggtcaggggtttgagaccggcctggccaacatggtgaaaccccgtttctactaaaaatacaaaaattagccaggcatggtgatgcacgtctgtagtcccagctactcgggaggctgcggcacgcaaattgctttgaacccaggaggctgaggttgcagtgaaccgagattgccccactgcactccagcctggggtgacagagtgaaactctgtctcaaaaaaaaaaaaaaaaaaaaaaaaaaggaatgaacctctgatacgttacagcataggataaaccttgaaaacatcatgctaagtgaaataaacagacacaaaaggacaaatactctatgattctacttatgtgaggtagctaaagtagtcaaattcatagagacagaaagaatgatgggccgggggcaatggctcacacctgtaatcccagcacattgggaggctgaggtgggaggattacttgagcccaggagttggagaccagcctaggcaacatagtgagaccctcatctctgccaaatttcaaaaaattagccaggcatagtggcacatgcctgtgatcccagctgcttgggaggctgaggtgggaggattgtgtgagcccaggaggttgaggctatagtgagctgagatcgtgccattgtactccagcctgggcaacagtgcaagacccggtctctaaaaaataaaaaggaaaaaaaaataagaacagtggtttctgggggctggagggaggggaaatggggagctagtatttaatgggcacagagtttcaattgggtaagatggaaaagttctggagatggacagtggtgatggttgcacaacaatatgaatttacttaacaccactgaattgtacactttaaaaatgttaaagtggggagactgggcgcggtggctcacccctgtaatcccagcactttgggaggctgaggcaggcggatcacgaggtcaagagatcgagaccattctggccaacaaggtgaaaccccgtctccactaaaaatacaaaaattagctgggcgtggtggcgggtgcctgtaatcccagctactcgggaggctgaggcaggagaatcgcttgaacccggggggcggaggttgcagtgagccaagatcacaccactgcactccatcctgggcagctgagtgagactctgtctcaaaaaaaaaaaaaaaaaaaaagttaaaatggtaaattttatgttaggtatattttatgacaaaaagattttaaaaatccccccttcatcttcatctatattacccatctgtccatggaccctagaggaaaattgggagattgtcaatttaaccaaattggtctctggacctcattctcatcatgtgtgaaatgaaagagttggctggagtttccacaatttcatgtagagatgttgagtcagaagacaggagatgtggggaggtaactcttatggaaggtaagaagcacagcactgtagaaacgaatattgatgtctactggattttggaagtctgctacaggtcagacatctaaatttttgttgacaaattttttttaatttaaattagaaaacatttcaagcatacagaaaatccctacatatagcgattgtttaccaccaaaaactaacagatgttaatattttgccatatatatatatgatccgccagcctctgcctcccaaagtgctgggattacaggcatgagccaccatgcccagcctatgtgtcttgcttaataaatccattcctaccctgaattgataaagatgtcttttcaatctatgtctttttttctcttaaaaatttctgctctttttaaatttttctattttcttattttttttctttgttcttcagagcagatctactttctttgaattctataatctaaaatttttaattaactttatttggaaataatttcaaacttaaaaaatgttgcaaaaataaaaaatatgcaaagaacactcacaggctgtttacccagattcacctattgttagcattttaccctatttgtttatcatttgaaatagataatatataaaacataccatatatcatatctaatatatattttttctggactgcttgagggtcagttatatacatgatgctttaccattaaatacttcagtgtgtatttcctatgaacagggatagtctaacataactacactaccattattaactttataactttatactcttttgaatctcctgtgatattccaattttgtcaattgccaatttttttgttaatgttgatgttctttatagcatttttataaccccatgccgccctataaccatttttcttttctttttttgttttttgagatggagtctcactttgttgcttaggctggagtgcagtggcgcgatattggctcactgcaaactctgcttcccaggttcaggtgattctcttgcctcagcctcctgagcagctgggattacaggtgcactccaccacccgcggctaatttttgtatttttagtagagacgggacttcaccatgttggccaggctggtctcaaactcctgacctcaagtgatccgcctgcctcggcctcccaaagtgctgggattataggcgtgagccacggtgcccggcctcaagccctataaccttatagcactttaaaaaaatccaatgatacagaatccaaactaagggcaggtgttgcatataattgtcatgtctttttaggtttctttaatctgaaacagttcctcaacctctatttgccttctatgacattgacatttttgaagaatgcagtcctccccacctttttaaatagaacgtttctcatttagtgtttatcttatgtttccttgtgattagatttgaaataatgctggaacattgccgagacgtattgtgcagcactgcataggtgtagtattatgtccttctcagggtatcacatctggaggcaaagaatgtctctctgcccctcatggttaattttgatcacttgcttaaagtattgccccatttctccactgtacaatgactgctttttattttattccccactcccttccaactcatggcaatctggagggagatactttcagaccctgcaaaagttctgctcctcatccaacatttcccccagctttagaatccactgatgattcttacctgatccaatctttgccaccaagtctgaaaatgattcatttaaaagtttttaagttttatttttcacatataggtctttgacctggaatagattttgtgtatggtgtgagatagggattgaattctattttccccccagatggctaatcagctccatttgttgaagtttattctttcccagttggtaagaaatgtccacgtcttcacacatttgctgtgtttgtttcagtactgtatattctatttcattggtccatttgtttatccttgtgccaaaactatgaagtctttattgccatagctttataatatatatttatataaatatataattgctgtcactacataatgtggatttatataaatatataatatataattgctatagctttatagtatatatttatataattgctgttttatatatcatataattatataaatatataattgctatgttttatatattatatatttatgtagatatataattgctatgttttatatattatatatttacataaatacataattgctattgctttataataaatttgtatatcttatagggcatcttccattatactcttctctaaaattgttagctattcttgccatccgggcaattatattcattttcacaacaaccctcagattaagcaattgcccaaggtccaaaaatcagcaagagggacttggaacccaggtctgtcggaggccaaagctcttttcattacttcctgagggtggttttctaggcatggagaagcagaggtcagggaatcaagtgtggcgagagagagaagagaagtgaaagaagaaaggcaggtgtcagcttggtgtgggtttggtctctgggatatagactttgccagccaaaggatggagcttgaacttagctggcagaactggaaacagaagattgtaaggaaagggactgggatcagtgtttcttctccaggacggattacccacagctgtccacgggcaggcacttgttactttctggctgagcagggcagtgtggccgacggctgaaaggggaagctgcggctgcttttgtgcaggggtggtggtgatgagggtgatgtggggggctggaaggcatggaggggaaaggatctggctgactacctggaagccaggacagatcccaccccagaaaggcgcagtaggggctctcatcctccactagcccgcccctccctacctaattaaggaccctaatcagcttggggagattaagggctctggccggctgtacccacgcccccgccctggcctgggctggcaaggaagacctgtgggcgggcgtcaaaagggggaccggccctgtgacccctcaccgggggccgtgggcccgagcccccggacttccctgtaaatgtcagaggcccctccgctgggatagggtcggtctgagggcgcaggcgagtccctgctgacccctgacgcctccgacggggggaggggcaggccgggtgggagcgggaagccggggcggcagaagggggcttcggggcggtgtccttggccccagttagtcttcccagcctccggagggggcggtagcagcagaatcatcccatgggttactcgggcttggagaaactcggggttacggggagaaccctaggggaggccggggtctcagtcgctcagcctgctccgtctgtgttcgcagaagccggcaatgaccgcctgcgcccgccgagcgggtgggcttccggaccccgggctctgcggtcccgcgtggtgggctccgtccctgccccgcctcccccgggccctgccccggctcccgctcctgctgctcctgcttctgctgcagccccccgccctctccgccgtgttcacggtgggggtcctgggcccctgggcttgcgaccccatcttctctcgggctcgcccggacctggccgcccgcctggccgccgcccgcctgaaccgcgaccccggcctggcaggcggtccccgcttcgaggtagcgctgctgcccgagccttgccggacgccgggctcgctgggggccgtgtcctccgcgctggcccgcgtgtcgggcctcgtgggtccggtgaaccctgcggcctgccggccagccgagctgctcgccgaagaagccgggatcgcgctggtgccctggggctgcccctggacgcaggcggagggcaccacggcccctgccgtgacccccgccgcggatgccctctacgccctgcttcgcgcattcggctgggcgcgcgtggccctggtcaccgccccccaggacctgtgggtggaggcgggacgctcactgtccacggcactcagggcccggggcctgcctgtcgcctccgtgacttccatggagcccttggacctgtctggagcccgggaggccctgaggaaggttcgggacgggcccagggtcacaggtaggctcccttgcagggtgcgaggaggtcggctggtcctgccggcagccggacggcgccgcgagccaagcctctgtccgcagcagtgatcatggtgatgcactcggtgctgctgggtggcgaggagcagcgctacctcctggaggccgcagaggagctgggcctgaccgatggctccctggtcttcctgcccttcgacacgatccactacgccttgtccccaggcccggaggccttggccgcactcgccaacagctcccagcttcgcagggcccacgatgccgtgctcaccctcacgcgccactgtccctctgaaggcagcgtgctggacagcctgcgcagggctcaagagcgccgcgagctgccctctgacctcaatctgcagcaggtagacggtcccgggaggagggaagaaggcaagggagaggggagaggacagccaaagcagggagaggaggatgcagccaatggagaaagaaccactggcagctctagctgtttggagtttcctgggtaatgtagaggctctggccccacttggggtctcttagtgtacgaggattgcctctagagagtaggcaattcgacctctcaagtccaacatcaagcagtaaactctaatgaactgtaaactgcaaaaccttttgcaattggcttcaaagtaaacccgtttccaccaccacatactcccagctgtctaaaataaatacttggtgttcttgaaagcaggaaggagggaggatgccaatccaaccttcatccctagttcagaggtatttcctctggggcctcatctggtggtcttagcttttcaagggcctagacaccttgcaagaagcagaaagttccctgggtggattcaggggcaatcctaaccagatccatagtgtatttccaacatccagctaatacctagggatccccaagtccccagaatcccagttcagatcatctaactttactcccgccacaaagggggactagaaaccactatgagaagggaatttagatgtcaacgggcagtgaattaaccaccacaaaggtccaactcacaggcggctgcatgagagaagggtcgtaggggttgcaatttcccatcgatgcccctagattcttccaagaggattggaggtgtccaatggaggggggaggggtgcagtgatgggaatagtcagaagagaatacaagataggaatcataatgagatgggatggagggagggtcggtcagtggagagagggaggttgagaaagtagagagagaaaagcccttcagctctcagtaagtaccacagcagtcctctccactgcccaaactgcgcaagcctctgagcgtgtgagtcacccttgattccttgaattcttcgcccccacttccaggcatcaagccctgttactgttacttcctaaagatcattcgaattcatccgctttctccatctttactgtcactgccctgattcaggccacagcacccccagcccaaatcccaaaacataatctctcagatggtctctgcttcaacactcacctgcccaacacctttctccagatcaagcttcagaaatctgacagatctcaccctgtcatgcccctgttcaaagcctcacagtggcttctgttgccctggatagatgcaggcctctccacatggcttaccaggtcacctgtctttctctctcttccacctcccatgaacttcagccagaccaagctactctgggttcttggaatgtgtccttctcttttgcctctgagcttctgagtgtgctgtttcctctctcttgtccctgcctcccctggataattctgactcatcccctgaaggatggtcacttctaacagctccttctctgtccacagcctagggtggggacacccattcctgtctctgcagctccctcagtttcccctacttttactcattgcactgcctgaacacccctgtctctttggcaagaagaaaggttccttgagacggggtctgtcttgtacactgatacatctttagtgctctgcacagtgcctggctctctgagagatggcaactgggaataatagagaagcctgataagatcgggtggtaacaatagagaaggttttttgtttgttttttgtttagtttttttgtttgtttgtttgtttttttaaggaacaacagaaaatagaagccaaccaaaagataggtgagaaggcttttaggtgaatggtaggtgatgaggttaaaactatatgctgggcaaccaacaggaagaagagaggacctacaggtgatggagaattagaatcaaccaatggtcagagaggaggctgagtcctgaaaagaggaaccagttagtggggagagcaggtgtgacagccaataggagagggaggaagagagagccagtggggagggaggaagagagagccaatggggagggaggaagagagccaatggggagggaggaagagatagccaatggggagggatcctgggaacaactaactggaaggtggcaacagtggataccctgggcttgacaggcagtgaaagaatctggtctgtctgtgggctgtgaccccgacctctgagcccctactctccttctccaggtctccccactctttggcaccatctatgacgcggtcttcttgctggcaaggggcgtggcagaagcgcgggctgccgcaggtggcagatgggtgtccggagcagctgtggcccgccacatccgggatgcgcaggtccctggcttctgcggggacctaggaggagacgaggagcccccattcgtgctgctagacacggacgcggcgggagaccggctttttgccacatacatgctggatcctgcccggggctccttcctctccgccggtacccggatgcacttcccgcgtgggggatcagcacccggacctgacccctcgtgctggttcgatccaaacaacatctgcggtggaggtgagggcgagcaccccagtccccactgagacaatcgccatggaccatccacaaagtgatgaaagagagtggactcctatcctgtaatccgtcttcgatgcccttctaggccctctcccagcctctggcttgcacaggacccctctcttgctgagctccaaagccctcttggaaattttctatcattcccagcctctcccctttgaggaactatgacctacccctagagcctctctgggcccccatccccctttcctggaggggccagcatgtggcatgcctccctagagaagaggcctcccctggcatcgctcctcagtatacctcctgtcactgtcccttcaggactggagccgggcctcgtctttcttggcttcctcctggtggttgggatggggctggctggggccttcctggcccattatgtgaggtgagtagtggaatgaggtaagtaggaagtgagcttgtgccagaaatggaagtctgcagcaaaaacagcaggctgggttcactcaggagtagaggaggagatttttcttggggtgagggtgttctggtgggctggtagagtcccaggggatgtgtgctttggggatggctgccctccaggacccctcccctgagccaacgttatccctcccccgcatcccctgctggtctcttctgacggaacttggtgcccttggtggaggtgacctctttctccaccaggcaccggctacttcacatgcaaatggtctccggccccaacaagatcatcctgaccgtggacgacatcacctttctccacccacatgggggcacctctcgaaaggtgggggaggcagagaggcaggagccagttgtcttctttccgtaaatttggttccttccctgggccagtcccgaccccagctccctacttgggaagcctgatttctaccccagttctgtcccacgtctgaagtctagggatcagcaccctcatctgtgcaatgagggtaacagtacctgtcctgactactttcctggcggggaggtgaagctccaacaagaaaatgaatgtttgctttgtaaactgtaaagcgtgcacttggggagtaatgtcattatcaccttccctcattgagattccttcgcctcccatctttaaatccccaaaactcagcctgacctcaacccaggactctgacaccagaatatattttgacctcttgcattgacctctacctgctaggtggcccaggggagtcgatcaagtctgggtgcccgcagcatgtcagacattcgcagcggccccagccaacacttggacagccccaacattggtgtctatgaggtgagcctgaccccagccagacagagagacagtgggggaagaatgctcaggccctgggcagaggggaggcgcactctcaggaggacatgtagtcatgtcaaatcctgcaggctccaggagatgggggatgggagcccagacaggatctagggaaaggtcatggatccctcaaagggaagcacctaggaatcttccctccccaaggatttttctctagccactatctgggtaagggctcctcaaaagctaaccacagtgacccagagactggaggctggagctgccagggagcatgctgggaccagcaggtaacatggtgtggccactgagaccatctccggcctggtcagagcctctggccctgcccctcagcatttccacccaattcagaccagactcaggaatagcaacccctagagggggaaaagaaagtcacaaaaaagtattaggacattaactttggggctggtaaatctgaatgcggtcaagtggaggggagatgatgagaacagattgagagagagctgagagtgctgagcaaatcaagagagtagaaatttagagctcctgggcttcaggtcatgggaaggaatgcagaggctcctatcatgtcacctagagatcatcatggccaattctcagaggaggcactattgtcatttggggcagattgtcctaaattgtatgggactactctgtgccttgaagaatatttagtgtttcttgtctctggccctgtccactaatgcagctcctagtttttgtgacagttaaaactttccccacatttatttccaaatgctccttaggggtcagtactaaaccccaattcccttctaaattcccttctagtccaaatcccttataaacaagacagggccacctgcataattagcgagatccagggcaagatagaaatgaggggctcctcgttcattcatgatgatggcaggaggtcattgaaccaagcttgggcccttcggagcacgaggccctgtgtgactgcacaggtcccatgcctgtgaaccggccctgccaacagttgaggatgaggtccagcatcaggaggggagctgtctatagttcagttagttttcaataaagcctgatctacccagattttttactcccagaacatgttctctcatggcagtggatggtaatgagggttgtgatgtcgatgacacttgtggttgtattaatgcacttaataggactattggtgggcacagctgggttggtgaggacagccatccatggcttcagaatctctgtcatccaggggtgggccctctcccagatggctgtgaagtggatgggcatacatcaaaccccttggttcaatgcattttgtcacatggaagatgcattctgggacagtgagccaatggaaatgagggggaggggttctagggctccccatcgtgggattttaagagactgagttccctacccccatcctctttgctgcagggagacagggtttggctgaagaaattcccaggggatcagcacatagctatccgcccagcaaccaagacggccttctccaaggtgagacttgggcctgtgatggggcctaggtggccatcggtttctccctccttgccttctctttgcagctgggtacagaggtaggtctcagttaagtgtcccctctggctgagtgtggtggctcatacgtgtaatcctggcactttgagaggcagatgtgagggaggatcacctgaggccaggagttcaagaccagcctgggcaacataaagaaaccctatctctccaaaaattttaaaattagctgggtgtggcgttacatgcctgtagtcccagctactcttcagagggtgaggagggaggattatttgagcctgggagttggaggttaccgtgggctgtgatcatactactgcactccagcctgggtgacagagcaagaccctgtcaaaattaagaaagaaaaaaaaaaacatgtttcctccaccctggagtaggctttcattattctctgccacaccactagttctttcctttgatcttgttgcaatgtgcaattgtatgttcatctgtctgcctgcttgtttctgcctctctcgctggactgtaagctgagtgagggcctcctcactcccctccattgtaatcaagcacccaacacagtgtctggaacattagagagacccagtgaatgtttgttgatctaatgatagaaaataaaaaatgagtttccggttctgtcaggccacttgtgcagaatagccctggacattctgaatgaagtgcaaagttggcaaggaggctgtaaatggcttattctggtccttacaaccttaatgtctccctttatctccatgccatgcagcctgggcctggccttcttccctgattcctctacaggagctcttggtcacagatgcagtgacttaagtggactatgtgtatggggattaatgaactcgatcaccatttaataccaggtgtttaaaatgaaaagtatctgggcgcggtggctcacacctgtgatcccagcactttgggaggccgaggcgggcggatcacgaggtcaggagatcgagaccatcctggctaacacggtgaaaccccgtctctactaaaaatacaaaaaaaattagccgggtgtggtggcgggcgcctgtagtcccagctactgtgggaggctgaggcagaagaatggcgtgaacccgggaggcggagcttgcagtaagccgagatcgcggcactgcacttcagcctgggcgacagagcaagattccgtctcaaaaaaaaaaaaaaaaaaggaaaggaaagaaaagtatccccttattgggcatgtggagggaaaagctagaaagggcaccagtcagccagctaagccacctttttttctagcatgccccgattgtgagggcactgtcctgcagagcagtcagtcctgtcttccctaactgagggagggtgggagtctcagacccgactgacacaatgacgtaacgccaagcagagcagcccccggccaggttgcaggcacacgccatttctggtgtcctttgaaagtggcacagcttcaggccgggcaccgtggctcacgcctgtaatcccagcactttgggaggctgaggtggatggaccacctgaggtcaggagttcgagaccagactggccaacatagcaaaaccccatctctactaaaaatacaaaaattagccaggcatgatggcacacacctgtaatcccagctattcgggaggctgagacgggagaatcgcttgagctcaggatgcggaggttgcagtgacccgagattgcacgactgcaatccagcctgggtgacagagtaagaatctgtctaaaaaaaaaatacataaacaaaagaaaagaaagaaagtggcaccgctcctccctggctctcccagcaaaggctgttaaatcaggagaggatggtggttccaggagcttctccttcatgagctgcttcccttaagacccaggcagttcagagttttatggctggggccaggtgtggtggctcaggcctataatcccagcactttgggaggctgaggtgggaggatcatttgaagccaggagttcaagaccagcctgggcaacatagcaaggctcccatctctacagaaaaaaaattttaaatgttatctaggcatggtggcacaagcctgtagtcccagctattcaggaggctgaggtaggaggatcacttgaaccaaggaatgaaaggtagcagtgatttatgatcatgccgctgcactccagtctgggcaacagagtgagacctcgtgtctaaaaaaaaaggcttatgatcaataaatccgaacctgcctgggtcctgatcaccaatgcaaagttgtcttttcattcacagcattaggctaaaccatactcagtatccaaacagtggcctttgactatattgttttttccaaaaataggactatgtgtagaagagagcccccgtacataccttatcaaccatttcatccaccatttgtaaaaatctcatcttctgggtctggatactcaaaaacagatcttgattaacagccccttccccacattgccctgggcagaaaatgcaagtcaactctccccctctcagctccaggagctccggcatgagaacgtggccctctacctggggcttttcctggctcggggagcagaaggccctgcggccctctgggagggcaacctggctgtggtctcagagcactgcacgcggggctctcttcaggacctcctcgctcagagagaaataaagctggactggatgttcaagtcctccctcctgctggaccttatcaaggtgtgtgtctgggggtggtggggtgacgtcctgggggcagggatggggagcaagggaaccaagcaggctgaggctgcctcttaccctacccattccaagggaataaggtatctgcaccatcgaggcgtggctcatgggcggctgaagtcacggaactgcatagtggatggcagattcgtactcaagatcactgaccacggccacgggagactgctggaagcacagaaggtgctaccggagcctcccagagcggagggtaagagtcccctgtgcagacgaggatccaccgggatccccattatttcaagggcttctcccccgcttcctccctacctctgccctcgcactctcttcatcccacatccaccagacacaattcctgctacagaaaagatcttgtggcctctgagagggtgggctctgtgacttcggagacggggctgctgggggcgggacttgtacctgagctgcctgcagcagggtttgctctgattacaagtttgcctgagggtggggcttgtgcccaagagacggagccttccctgggcaccaccttttctgaagggcaaggcctatttgccaggctttctctgagatggctcctagagatagttgcagggctggtctcaggttgcagggtctcagaccggtctcaggctgcagggttggtggtgtctgggtgccaacctgggctttctggtgagggtgggagtctttccccagcggcgcctcagccccttccccatccccagaccagctgtggacagccccggagctgcttagggacccagccctggagcgccggggaacgctggccggcgacgtctttagcttggccatcatcatgcaagaagtagtgtgccgcagtgccccttatgccatgctggagctcactcccgagggtaaggctgccctgtgcgtggagttcggcccacaggggcaccctgcagttagaaaagagccagcctcactctttcctctaaagcaaagcccagtgatgaaactcaattatacggaggcccccttaaagctggcatctgcaggtctgggtgcagaaagccgtgcatggccagggtggggagcgtggttcattaggtcccagaccacaacagcttcctctttcttgatgctggaaccaaactgtttccacaactgacagaacagactcctctctgttctcaggggtccctgggaggagcaggggagggggagtgggtgcatcccttctgcacaggactctgagcaaactacttgatcacctatccctcacttgtcttacatacaatatgttagtttctttgcctatgtcacctcttactgacccccagagttcgaggtcctcttgttcctcctagcaacccccttccacactatactctccctccacacacacacactgaacctctgatgtaaagaaacccctgccaggcaccccctcccacatcttggtcttcaacagtcaggccagggtcagaggcagcctttgtgttctgggggcactccccctcactgtcccctcatgcctccagaagtggtgcagagggtgcggagcccccctccactgtgtcggcccttggtgtccatggaccaggcacctgtcgagtgtatcctcctgatgaagcagtgctgggcagagcagccggaacttcggccctccatggaccacaccttcgacctggtcaggggctgggagtgggcaaggactgggctggcctctgggatcccagatgcttgtcagcaacctgagacagctgcagacaggcaggctggcaggacctctggccttccaggctacctcctaaggagtagcctgaagactcggagtttgggggcagaattggaatgggggctgtggaggcttttggagtgggagatagagttctgtctgggtgggaggaatattcaattcaattcaaataacactgattgagaaccaagtatgtgcttggcctgctgtgacagaaagacccttggcctgggagcccaacgattgggctggctccagtgccctgtcaattactagctgagatcaactgacctctgggaaccctcatttcccacgtgcctcctaatcgtgtctgaaaacacagtgcccagcaccccggggtgcttgatgaatagtagatgaatggtggcagcggggttggggttcagagtgaacagccccatgagagggcccatgaggggggcataaagagggcatggcaacccaggtcttcagcagctttaccagcttccttctactgctagttcaagaacatcaacaagggccggaagacgaacatcattgactcgatgcttcggatgctggagcagtactctagtaacctggaggatctgatccgggagcgcacggaggagctggagctggaaaagcagaagacagaccggctgcttacacagatgctgcctccgtgggtgccagtgggaaggggtgggctgggagggcagctggagcccagccaggtagagtggcccccaggtgacctcactgcctgccatccctaggtctgtggctgaggccttgaagacggggacaccagtggagcccgagtactttgagcaagtgacactgtactttagtgacattgtgggcttcaccaccatctctgccatgagtgagcccattgaggttgtggacctgctcaacgatctctacacactctttgatgccatcattggttcccacgatgtctacaaggtgcagtgtgtaggggacaagccctcctgaccttcaattcagcttcaccagcctccagcccagcccttcctgcgcagcccctagcctacctgcccaatcaatcttctttcccagacctcctgtcccttatttattcctccagtccccagctcagtccttccactagcaacctggttctgcactaaccccaggtgggcccggtgacaagaggcaatcgcttcgtgtactcggggggaatgctcaaaagaaaattcacacaactccttcttcccccaggtggagacaataggggacgcctatatggtggcctcggggctgccccagcggaatgggcagcgacacgcggcagagatcgccaacatgtcactggacatcctcagtgccgtgggcactttccgcatgcgccatatgcctgaggttcccgtgcgcatccgcataggcctgcactcgggtaactcccgggtcttcccaggctccagcccatctccctctttagggcctggccccagatttcctgtagaggaggcaactcatggagcggggagtggggcttaccttgaagaggatgcacttaacaaggcttatttggggggctggtggagataatgggtgcgaagatcccccgaggccctacctaggtgcagcccagggccggccctgctagccccgccgacccccagcatctccacaggtccatgcgtggcaggcgtggtgggcctcaccatgccgcggtactgcctgtttggggacacggtcaacaccgcctcgcgcatggagtccaccgggctgcgtgagtgtgacggggacaagacggggaggtgggagggggacacgggaggtgagtcccgagctcacggcgtcccccaccgccacagcttaccgcatccacgtgaacttgagcactgtggggattctccgtgctctggactcgggctaccaggtggagctgcgaggccgcacggagctgaaggtgaggcagggccccaacccctcccggaggccccgccctgtcctgaggcaccgcccatcccgggccgcggctgcaaacctcagctcacccttctgacctggtctcccagttccacgcagactcgagatcccccacccctcaccccagtccgcctaagtccttccctctcccatgtctccccagggcaagggcgccgaggacactttctggctagtgggcagacgcggcttcaacaagcccatccccaaaccgcctgacctgcaaccggggtgaggggccggcctccgcggcagggcgagggacgagggacccctgcctcctgctctgtgtctgaccccccgcgcgcgaggcagcgatgacgtgggccctgccctcccacgccccattccccttccctgaggccaccgccccctccttgcaggtccagcaaccacggcatcagcctgcaggagatcccacccgagcggcgacggaagctggagaaggcgcggccgggccagttctcttgagaagtgaggcccggccccggacaggtactgccccctcagccccaaccccagctgccgcgtcccctctgctgcctgcagaacgtcccacccaagccaggtgtcccgatccctttctgacttagagagcccaggctggttcctaaaccccggggcttcccctgggagggaagcagccattgcaggaattttggttcagtagatctggagtggtttggaaatccaggcttaggaaactccgtaatcggggccttctgtggcccctcccctggccctatctcatccccagtgcataaacctggcttccgcagaagcctcacaggctgtgcactgcacaagagacaactctagggggcagcagtcaccagagaacaatgtgaaagcagaagccgtgcccactcccctcctgcaagaaactgacccgtgacccgctccttcctaggtgaacccccatgacccctttcctcgactcccctctgagatacccctcttttcttcaggattgttctggaaggtccttttcctgaaagttgctgctataggtgactggaagtctgtctaatgctggtggactctgcccagctctgcctcaaaggattttgggccttttacaagagctggttgcaaaaccagccatgtgaccttgggaaagtgtcacgcatgctctgctgtgatcccttcagtggcaaaatggggggtggcctaagtggttcccaaggcccctgtgcacctgacagctgggtggcttgtggccctcacccccaggagccctgagtccagcaggggatgtgagggtcagggattctccgcttcccagtgtctctcagggacccaggaaggaggatctgggattgatgcccgaccccagaggaagtggagttctgttccaccagagcagggtttgtcacatggcctgagggggcaagggctcctgtttagcctcaagcttcattcctatctccatctcccaccagtcagaaactggctgcttctcctgtgggtataatcagggaacttgcccaagtgcagagaaaagcttgcttcaatgctttgaggaaaggaaattgtgccacaccttgactgaccagaacatccaaagagcggcattctctgtttaactaggagctgctgagcaagcagttggacagaaaatcctctctgcttagaattttttctttttttttgagtctcactttgtcacccaggctggagtgcagtgcagtgacacaatctcgactcattgcaacctcctcctctcaggttcaagtgattctcctacctcagcctgccgagtagctgggattacaggcacccgccaccacgcccgggtaatttttttgtgtgattttagtagagatggggtttcagcatgttgcccagggtggtcttgaactgacatcaagtgatctgcccaccttggcctcccaaagtgctgggattacaggtgtgagacaccgcgcctgacctttgcagcaattatcaatgccctgtcctggcaagtccccagttgaagttgcctttgtgaaactctgaccttccagagcctgggccttggcacatttgactcttggtgtctgtcaccattgctacagaccctggaagaagtttgcagcaggctaggaaaccacctaggctgccaccagaggtagtgagtgtccagtccctggaggtgtgaaggcagaactggagacatcattgaccagggatacgacagtgagagggaattccggaactgaaccttcactacaccaagtgtggttggtgggccagggtcggcactgcctgtgagctcattagaaatgaaggatctcagggccccaccccagacctgctgagtctggatctgcattttaacaagttcctacaaaatattgacacgctcattaaagtttctgaatcatagaactaaatcaccctaagatctttaaatcttagaatctctaagatctcataaagccaggctacaaactagccaccaaatttcttttgtttggcctatagagtgttttgttttgagctaacatttaaaaatcaacagcttccacattttaaaaatgtatagcagatttcccccttctcttgaaatcagaagccccacatggtgcttgtgtcaccacttaaccacattctgctgcagctaaacagcaacagtcccctttatccagatgtcgccactccccacagactccgagacaccaagattttttgaacattcctttatattcctgcctggtgcctgtagacattgagcttaggactccttagcaggtattaggattacaggggctcctggacgggactttgccttcttttttttttttttaaactgattcatgacttccacaagcttagtggtattcccctccttcctaaaggtgaaggaagaatgtatcaaacatcgagaatccagcacttgtaagttctggttaccgaaggtgatgttgctacagagagcaatttagtgcaattttaaaaacattttaaattgaatttaaatacgatgaattaaagattaaaaacaaaacaaaacccgggcatgcacacacacacatttttaaaagttatttacattcttgaagattttccttaagattttctctgtacttaggtcccagggattgaagcgcagattcacatctctggccttggacctgactgtgtggatagagctctcagcctcctgtctcttccctcccgtacccgaccctgcagcccttccccttccttccctctctccctgcctgcaagggcctggagtagttaatggtgtgtgatttcggctgcctcaaggaagagtccaggattaggtgcagagggattagctgggacaggcttaggcagggctcctcccggaagcagaggcggatgagccagagggcagacccagtttaaggtagaagtggagtgggcagggctgagccagttccttcccaccttcactcagcctccttcccaggctggcctcaagctcaagtgaccagatgtgatagaagagccctgacccctccccagctagaagaacttggggaacccccaccccagagttcacagatctagtgggagaagagaaggcaaaagatgaagcctcagcctcctctctgtgcctcagcctctcctttctctgttcctgcctccctttctgctctattctcctgtctttgtgtccccacagtcccctttctgcctggcagtctctgtctgcctttctctgcagtttccaccatttctctggaaatcttatttcctggacccagtcggttatccagtctcagggctctgctgactcaagtcctccccaccctgttcctgtggcctgggcaactcccagcgcatgagagcaccggggcctggcttggtcactgggcatcccccaccttcagatgtgtttacactacctctgccagctggcctgcgccaggagcccacacttgcggttgtccttgccttggagatggctctgtagctggcagagcagtgatggccaaagcagggacctctcatagctgctgcttcaatcccacggcagagactctacagcgtgtcccggggctcacctggcgccttttttttttttttttttttttttgtgcttctccttagggtctgggccctgctccctgtcccatctgcagtggaccccaggcacccccctttgaggaggtggggtgaactgctccttggcagggatttgtgacactgcattgctgggctgtgttcctcgggctcttctggaccttgcaccgtggataccaggccatgtgccatggtatttgggtcctgggagggtgggtgaaataaaggcatgctgtcttccatgttgtggtgtgtgctgcttttagccaggagagtagtctcgacacccccatctctggaacgctcagccctgccatttccagggagggtttcagatagggttgaaccttagagatggcctgaagaggggaagtggccggggccaacagctcccaggaactcctctgctcagagaaccagttggggaagtctcgggcctctcaggctgctggaaaagaccagggtctctgacgcttttaaggtgggtgatgtggcttcatcccttgattgtatgcaggagggaagaaggaagagaaggacagagcttgtctatgccatgactccatgacccatggaccataacctacaaacatgggagccagagtccaagactgaaggaacagggcccccagatgggaaaggtgaggtccactggtctctgggcaggacctcatcaacaacccacactccacctctgacccttcacaaacctgcccctggagcttcagagcaggagagactatcccaaaatcaccagtgggtgactggcccctaagtcttccgggagcccagctgttcccgtgccaggcccaatgtcccagacaggatgacctgtaatggacatcgactgtgctgccttcctacatccatcctgctgggcagtgggcagccatctgtgccccattcttaatcccagtggaagtggctagaactgactgctgacttcccccttcaggccagcccaatcattccgttcctctggcctcaaagacagatgagctgggccaggctgatgaagctcggtgctgggacgttgtttgaagccatggggagaaattgtcttcttggggggttgctgagaggatgggacattgagagatccttgccaccacaaagacagagctgaactggcagatggagagagacaaagtcctgatggctactgtctgagctgggatacctcactgggcctaaagccaagtccggctgtttaagcaacatgggccagcaaattattttctttgcttaagccaggttgcgttgggttctttcttttctttctttcttcctttctttcctttctcttttctttctcttctttctttttctctctctctctctctctctctctcttcttctttcatacctcaaaaccctcacgatggctgggcacagtggctcatgcctgtaatcccagcacttggggtggctgaggtaagagaatcactagagcctaggagttctagaccagcctgggcaacatagcaaaatcttgtctctacaaaacacaaaaattagccaagcatggtggtgcacacctgcagtcccagctactccggaggctgaggcaggatgatcacttgagcccggaaggtcaaggttgcagtgagctgagatcacaccactgcattccagagcgagactgtcacaaacaaacaaaaaccttcgtgatgttttcacggtgatgaaatgttggtccatttgattacgatgtgctgatggctgcaagttcaacaggtggctttcccatctactccacctcctcacccaaaccactatgccaagcagacacctatccatagccacgcactttatggcctcgcctcaacatcattccctttgtctctggccagcatgtcatctcctaggcctctctctcagccttgatcacccactcccaagctgcatgcctccatcggcatattcctattgcaactatcaaccaggggccgctgaggccacaggggttctcctgcatggactggctggtcctcaaccacagtccctggggtcacctctcccagggcttagcctttatccaaggataaagggatgggcacccagagctcctgccacactctcttccagggcagaggcgagggcagggtaggtcgcggccccagtggaaacaaggcctgagggactgcatacccagctttgaaggtctgccctggaaggccccagactgcttcaggctctgaaaaggcaatgaggagggtccagtgctgagctcttatcctcaatgatgccaaggggtggaagcctttctggcgcttggagaagaggcccagccatggggtggctgaaatagatgatctcagattatctcaagaccagagctgatcccagaaactggtccttccctgagtaaatgcttcccagagaaggccagaggacatgccctgtgatgatgcagctgtacaagatgctccactgggagccagaagggaagcagagctggaggtcctgtgctcctcttttgaagaagggagaggtttaagatcatcagcatgctgaaggggggaagccagtactgtgagggagacatgggatggggtgacgggggaatgaggctcctgtgtccagtggggatagatccaagcactgcggagtgattgccttggatgggaagaagggaagcctttgaaagaggattagaataggacagcttgggcctgggaggagctgcacattccaggactttccatcaagagtttctgttttttcaagaaagtggaaggtgaggtcatcttctgagtgtgtgggggagggaggagtactattttccttgctaagtgctagaaactgggctaagcactttacctgataaacctcatttgataccttgagaatctcacgaggcatgtgcagttggtcattggtatccacaggacctacatcctcagatattttttaagggggagggggaacggagtctcactctatcacccaggctgcagtgcagtggcatgatctcagctcactgcaacctccgccttccaggctcaagcgattctcctgcctcagcctcctgagtagctgggattacaggcgtgcgccatgatgctcagctatacatcctcagatttaaccaacagcagatagacaatatctaaaaaacaaaacaaaaaataacaatacaacaataaaaataatacaaataaaaacaatacagtataacaactatttgcatagcatttatattgtattaggtaatctagaaaagatttaaggtacacaagagtttgtacttaggttacacacaaatacttctgcaccattttatatcaggaacttgagcatcctcagattttggtatccaagggggtcccggaaccaatcccctaaggatacccaaggataactgtctattacacttctgttttacagatgttaacactgaggcttagaaaggtcgtttggactgcccaaggtcacaaaagctactaaatgagcactgggactctacttttccaaagtcttaaactctacactatttttttaataacacaatgggtttatatttaatatagtacttctcatcaggaggatgttactcagttaatataaagtttttttcaaaacactaaatctcttttccatgtcgatgtcaatagtttttttttttaacattaaatttttttccgcatttcagtattagatacactgaatacatttttctaaatgttttttccccagagataaaagttttcctttttggctgactctccaatatctaaatataatattaacttgggagacaacaaaacaaaaatctaataaaggaatggagaaaagactcctcaacgattcaggaggcagtgattataaccgaacagtggtgatttcctaagattctgggcaagaacttccttcttcctatttcacatgctttgagagaattctaagattatgaaatattacttatgtaaatttcagccatcttacttctttgaccgcctttctaactagcaaattataggctgcatttttctgtgcattatttgttgtaaagaaaacatttttttttctatttataaatgtatgtttgttcccatttcatggaaacaatgaaaaatgtgaaactcccttatttactgattcttggaacctttcacacaccaaagctcaggtttagcctctatagcacaaaggttttcagggtgaggtttgactcagtaggcctttcaaagtcacatctgtccatttctttttcatgcgtatacccccgggcgattgcatcaccgccttctactgcttccacaacaggcagcaccaaaagcagtgacatgaggactaagcacaactgtgttgaaactgaggtcatgatattggaatcttgagggctgaaggttccaaagaaatggtatatatagaattctatctgacttgaaattttcccttcctggagctccggatgctgagattaagaggttccacgtgacatgaccttccaggaagcagccattacaggaatctaaactctacattattaataaagaggcaagaactgatgggaccaagtccctgaggaaatagaagtagctctggacaacagaaggcaaacctcttcctctgagccgggagcaggaataggagagatgaagtccacatgttttgtttgtttgtttgcttgagatggagtctcactctgtcacccaggctggagtgcaggggcacgatctcagctcactgcaacctccacctcccaggttcaagtgattctcctgcctcagcctcccgagtagatgggattacaggtgtgcgccaccatgcccagctaatttttgtatttttagtggagacaggatttcactatgttggccaggctggtcttgaactcctgacctcaggtgatcctcccaccttggcctcccaagatgctgggattacaggcatgagccaacatgcccagccaagtccacaagtttttaatgggaagtaaaggctgccaaagagcttcctttctggcgtcatcagggacaaggatggctgggtgtctggcatgaatcagataaatggacagggagtcaggtgagagtttgaggggtctttggtgagggtaggggacagggagggagctcagcggggagggggtctttgtggagttccagatctcccaggtcttcagcctcctggggcccaggatccctgagtgtggagaccctgaggaaagagccactctctagtgtcaagcattctcagcctcaaggacccagcctgcggcataagagggcactaataacccaaatagcaacgtacacaagagggacatcacagggctgggggcggcgggcgggtgcacagggaatgtggaggtgggccagaggcctggagcccatgacagcatgaggcctgttcagccattgccagaagccagggtgcatttccctgaccagaaaagaccctgccactagccaaagctagctgaggccttggacgcattggatttccctgtttggaaaatgtataagggaattaccagacagcttaggggaggcagctattcacccagggctgggggtcctcacatttgcagaggccccacactgcgtggttcttttctttagcatggctcagcagccccagagcaggggccagggaggggaatagggcttaaccaggggcatctggggcaagacagggtggcaggaggatttaagggcttagggagaaagtgatgaagtgcctcagacactagttttaaacctacctcctgcaagcagccttcctcaaatcacatgggggatattgattttgttttctattacctggaaatggtctccccatcgtttctgagaaatccacactacctcacagctcattggcattgccaacttgcctccagtgggcacagccagcctagcatcttgtataaaccctccccagtggacacgggaaattggaccacgggtgggttcctgtcccaaactgggtcagtgagagccctttgctggggaacgtggagctgatgcaaagacactccaaaaccgtctgtctacctcttagagaatccataaacacaagctgttgtggcactcattctctgccttgggaactggaaacagaaagaactggaaaagcgagagaggacaaaacaaacatgcagagaagagagagatggagagaattttctaagttcttacaacgaacgctctagtctctgcctttggctatccctgaggccctgctggatccctagcattttgtccttacaataaattctcctctttgctcaagttctctctactatctctgttccttacaaatttaagagtcctaattaccccaatctccccaacctctagagtatttcagtcctgtcttccttctgttatggatccactattgccctgggccatattttaccttgaagatgacactaggggtttcttctttccttcgagacagggtctcactctgtctcccaggagagagtgcagtggcgccatcattgctcactgcagccttaacctcctgggctcaagtgatcctcccacctcagcctcctgagtagctagaactgcaagtgtgcaccaccacaactggctactttttttaattgttatttttatagagacagggtctcactatgtttcccaagctaatctcaaactctgggctcaagtgagcctcttgcctcccaaagtcctgggagtatagacatgagccactgcacctggccctttttttttttttaaattaaaggaaagtttattctttttgtacaagtatcttcaggtatttataattttacagtttatattcatacatataattctagatgattaagaaagggatccatttttataagttgaagaggtcaagatgaaagtgtttttccttttgatatatggttttaaagccacagtcttttctatgagatattaaagctccaaatgaaagtatggttctccattgtatgggagaagtttattttcttttgtttccagcaaagctgtcagcccccagcctccatcatggcactaactagctacacatgagtgactggaacacacatctctacaactggcccagtccccaccaggtatgtttaaagaggctgcctttgaggaccctataataaaggaatcctttatcaaaggacatgcccaaaccaggtgcaacaatcccacagactctactaatgcacactttattgccagggacagtgacattcatggagagcagagcagaatcctcccaatttactagcagcagccaaattctcaatcttttccaaagggaatgaagatccagcatgctcctctgccactcctctcatgagcaggtaggagagtgggcactcactgggcagagccagagaggaggggcagccatccaggagaaggaggatgacgctaggtttcatcttctatgtcaatttcaaccagttggttgtgcctctctagaatgctatgatgacaaagattctgaggccattttcaggcttaaaaagaattcatgggttgattaacaatgtctgccatgggcacggattgggaaggggctgagtgctcaccatgtatattcactgaccttgtcacacatacaacacccagctcattgccacccctgtagacacgcataagacatacttgttgaatgaatacatgacatgattatctaagggacccctttggtgggatgagtgacagggatgcaggacacgaaagatgtgaggaggagcagaacagataagacagagacatgtgatgctctcagttcaggaatcaaatacacagggttgagagacctccgtattcatcaggattcttctgatctaaagggtttcaatttttttgtaaaggaaacgtttgcttcaggtaaccaaaaaaagagaccaagaataggtcttgcttcaggtatcggtgcatccaggagctcccgcactgtatctctacatgccattcagctgtgcttttgtctgtgttgtcttcattctcaggtgggctctcctgaaatggtcacagaaatagccagcaaccatttcaaggcttgcttacatactataatctcagcaactaaaacaaacaaacaaacaaaaaatcccagggctgattttttgttgtttgtttgtttttaaagacagggtcttgctctgttgcccaggttggagtacagtggcaggatcatcaatcactctgtaacctcagttcctgggctcaagctatcctcctgcctcagcctcccaagtagctgggagtacaggcgtgtgccaccatccccagataatttccaagtcctgcctaattttgcccaaactgaatcatgtgcccacccctggagccagagagtgaagcgagctctactgtaatcatgtgggctgagaatggggaaggaattattctttacaggaaaatggggatgttgctacctgaataaggggactgggtgctgccatcacataccttccattatattcccttgggctgtgggtttttcccatcaaatcagtagctactggagagcaaggatgttgtcctgtttatcctttcatccccagcaccctgcacaagacctgactcagaagtttccagacccctcctagctgatgcaagacctcatccatgtcttactgacagagtaaaatgaccaggaaggagctctcacaccatccctgccctccagcccacagacccttctgtgactgtacccatctgcccagcctcctgcctattatgatggaagatgtgttcctgctctgctgtgagagtggtttgctgcccagcctttgttccccatcttcctggtaccaaccccacagatttcctttatgaaactacccattcctattctcagccatgtgatctgaatgagactgactccatccccaattccagggatacaccattgttggcttaaaccattccgtatattccctgcttctggccacactggtcggttcagggatcacagtgatcaatgaaaaatgacctggggggcagccacctgccagagttttggaaaagagaagcgtcaaccctcctcctcaggtgctagcagaaaaaaactccctctcttctcctggttgttgtggcacgaggacgtgagttctggaactaattccagaacagcagccctgggtagagcccaagattgaagtcaacactacagaaggcagaaagaagaggccaaaagacgtcagggccttggtcatctctggggcagccatgctgtaaccacaaggctggggaggcagagaacagcattatcaccctcaacttagaccaaacatgattcagcactggggctggccacattcctgccctgaagcaaattttggtttgatgaaggcagaagggagaacgacattagggcgggtaattcattgtgtctgtcacacaccctacctttgctactgtagatgctgataaccaactgcattgggaaagtcagcttcagttggaattttctgttgcttgaacttcagccttacttgttgccagcatccctacttgggctctggggctgccaccttcactttcttgggttttcacttctgaaatgggctcttctccctcctgcatcaactttcctccctcgttcccaagaagacataaacacgcttcacgggcagcagttctcaatggtggctgcatactggaatatccagaaagctttaaaaaatgcttaataccggtggctcacgcctgtaatcccagcactttgggaggccgaggcgggcagatcatgaggtcaggagatcgagaccatcctggctaacatggtgaaactccgtctctactaaaaatacaaaaaaattagccgggcgtggtggcgggcacctgtagtcccagctactcgggaggctgaggcaggagaatggcgtgaacccaggaggcagagcttgcagtgagctgagatcacaccactgcactccagcctgggcaacagagcaagactccgtctcaaaaaaaaaaaaaaaaaaaaaaaaaaaggttaatacctgggtccaatatccggaatctggggagggacctaggcattgctttttatattgccgaggctggtctcaaactcctggcctcaaataatcctcccgccttcacccccacaaagtgctgggattacaggtgtgagccaccatgcctggccacaatttctttttataacttgtaaagttacaagtttgaaaaaacaaataagatgatgcaaaacaaaattaaaatgaattcaaacattttatcaaaggcctatctcattctgcttagccctatcttaggattctccacaaaattcagctaagaagacttcagttttacctcttccaaggtactccctgcttcagcagaagtacgtagaaaacagtaaaaggtgctagaatggggctatggatgcaactggtagggaattagaggtggagaagggcaacaggttgatcttctaagttattatggataaaagtggaagatttaacacaaacatggactttttctccctccaaaaccccattcaaatggcagtaaaagaacttttttttttttttttttttttgagacgaggttttactcttgttgccctggctggaatgcaatgacatgatctcggctcagcacaacctccgcctcccaggttcaagtgattctcctgcctcagcctcccaagcagctgggattacaggcatgtgccaccacgcccggctaattttttgtatttttagtagagacggggtttctccatgttagtcaggctggtcttgaactcctgacctcaggtgatccaccggcctcagcctcccaaagtgctgagattacaggcgtgagccactgtgcccagccaataattttttttttttaatggtgttgtgggccaggtgcagtggctcacacctgtaatcctagcactttgggaagctgaggcaagaggattgctttagcctaggagtttgaaaccagcctgggcaatgtagggagacctggtctctacaaaaaaaatttaaaaattagctaggcatggtggcatgtacctgtggtcccagctactccaaaggctgaggtgggaggatcgcttgagcctggaagattgaggctgcagtgagctgtgattatgccactgcactccagcctgggtgacaaaggagaccctgtctcaaaaacaaaaaacaaaaaatggtgtggtagattaaacatgtacactgattctttcctcctccttctatcaagaggttgagtccatttcccctcccacatggactctgggctggtctgtgacttgccttgacccatgcaatgcatcaaaagtgacactgcgccagcttctggtctgggctgcaagaggcctctgggatccgtgcaccatgtagtgaagctcaggaaggattattgaatgatgagcaaccacgtggagaaagaccccgccggcccccagccatgctggacatgtgagtggaaccattcttggatattccagtgccagcctatctcccaggcgaatgtagttgcatgaaggactccagctgacactgcatggactcctgcccaaattgcaaaatcatctgcaaatacatggttcttggtgttttaagctactatggtttatagtagtttattctgcagcaatagataatacccacataccacaaatatcagaaacaaacaggccgggcgcagcgactcacgcctataatcccagtactttgggaggccgaggcagttggatcacctgaagtcaggagttcaagaccagcctggccaacattgcgaacgccgtctctactaagaatatgaaaattatctgggcatggtgccgaatgcctgtagtcctagctactcaggaggctgaggcaagataatcgcttgaacccaggaggcagaggttgcagtgagccaaaatcgtgccactgcactccagcctgggtgacagagagagattccatcttaaaacaaaaacaaaaaaagaaacaaacaaaaatccaaaataccttatcactaatatcctcagagaaacaaggtcaaatatcgcaagcatgaaacacaaacagattactaataaaacaaatatacacaggctggacatggtggcccatgtctatattcccagctactcaggagggtgaggtaggaaggtcacttgagtctagcagttcaaggccagcatgggcaacatagcaagaccccaccagtgaaaaaaatatgataggaggaataatagctcaataggactagaggagaaagttgagaaaatctactagaaaacagaacaaaaggcaaaatgatgggaaattggaaataaaataaaatggagaataaatgaaatcgagaatgggaactggagagccagtttgggagacccaacatctaaagtataagttcaaaaaagagacactgaaaaaataaagagaaggaaataatcgatgaaataattcaagacatcttcccaacactgagggtcatgaatttcaagactgaaaggacctactgagagcactgcacaattaataaaaattgactacaccttggcacatcattgtgaaattatggaagctgggccagggagaggctcctaaaagcttctggagaaaatgtcatgtcatatgaaaataatcaggaatgcaaatagctctaggcttctttatagcaacactgctaccattggagcagtgctttcaaaattccgaaccaaaaaaaaaaaaaaattgatttcagagctactatttaagtgtatagatagattataggcatttccagacatgcaaagtcttaaaaacttctcctccctcccacataccctttcttgcttagcccaagaaataagccaggaaataacaaaacatgagatccgggaaacaaatctccagcacagcagagaggtaaaaggaagacaaaggatggtggtgaagcaagagctcaggaggaccaggaaagaagccaacaggacacactggagagactccttcacacagtggaaccgactgggaaatggatgtgtctgaactgatagagaggcaatctgaacaagtggtgaagtttcggattaaactaatgaaaaatatatagaaaaccagaccaataatataatcattattatatagagaaacaacaaaaggttttgtatggaagaaaaaaataattacagtatactataaatgtcccctatgaatagcatatccataacaaaaatcacgtaaacactgagtgtcgtttgctcggtcctaataaaactgtactagaaggatgggggtgagaaacgtttgcaaatgggagcaagactaggaaagaaaatgaaatcctatcttccaggccaggcacggtggctcacgcctgtaatcccagcactttgggaggccgaggcgggcagatcacaaggtcaggagttcgagaccagcctgaccaacatggtgaaaccctgtctctactaaaaatacaaaaattagccgggcgtggtggcgcatgcctgttatcccagctactcaggaggctgaggctggaaaatcacttgaacctaggaggcggaggttgcggtgagccaagatcatgccattgcactccagcctgggtaacaagagcgaaactccgtctcaaaaaaaaaaaaaaaaaatcctatcttccacagggggaagccaatatttgcctaaagctgaaaaatcattaaataaacaatcatgcatgctattttgagatgcagtggtttagattatcaaagaaagtagtgaaagttattgtctttcatgagagggaaaggacagaagtggagcaggaagcagttgttggtgagagatttgtagaactatttgactctttaaatcatatgcatctacagctttgatgagaatattcgaatttaaaagaaagtaaaagagaagacaggaaagaggaaggaagggagggagggagggagggaaacaaaggcccggtgcagtggctcacgcctgtaatcccagcactttaggaggctgaggcaggtggaccacctgaggtcaggagtttgagaccagcctggccaatgtggcaaaacctcatctctactaaaaatacaaaaaaattagccgagcgtggtgatgggcacctgtaatcccagctactcaggaggctgaggcaggagaatggcttgaacccaggaggcagaggttgcagtgagccgagttggtgccattgcactccagcctgggcaacggagcaagactccatctcaaaaaaaaaagaaggcaagcaggagccaaatcattcaggggctcaaagatggggtgcacatgacttaatggacattttaaaatctcaagtaaacccctttcccagtcagggctcagatttcttcatctatatcttgaggggttgggtgacaactcctgttcaacctgtctgagatcatcatgagctgtaggacagaatgtaataaaatatttacatgatcaagggcgatggttctttttttttttaaccttttaagtaggaagggtaatgtgctgtaacaagatttgagacaagcatgtctcatatataagcataaaaacccaatcatcatgcttaccaagtacaaaaggatcaagggcagtggttctaaagaagaatcaccctactgtaaaatgtagattccctggctaatcttctggggagtctgcctccttggtgtgaggcagggatggggaactggcattttttttttcttttgagacagagtctcacactgctcattctgctgcccaggctggagtgcagtggcatgatctcggctcactggaatctctgcgtcctgggttcaagcgattctcctgcctcagtctcctgagtagctgggaccatgggcacccaccaacaggcccagctaatttttgtatttttagtaaagatggtgttttgccatgttggccaggctggtctcaaacccctgacctcaagtgatccacccacctctgcctcccaaagtgctgggattataggcaggagtcacatccaacccggaactgacatttttaataagcattcaaagacatctgatgccagccatctgcttgccacacgttgagcaacgctactccaggacaagtccttggaggtgcaagatcacaggtttaattgagataaaacggcaaatcaattccccttttcagggagaaagtgtcaatttggtattgatatgtttttagcacccctttagcgttagataatctcctggaacagggagctggccacaggcaaaagaatctacctggaattgaattacactgtttggttttcattgcattctcctttattcttaccttctattatgggaaatgaaacgaattttcgatttacaatagtgacacaaagtttcctttaaaatagattcactgaaatttctaagtatccaaggatgtattttaggatgaagagacaataaagcattttcactttttcctagactcactagattttggcacatggatacttgcaatattgatttgtattatgagagtgatctaattattacaaaaggagctataatcactaacttattcttaataataatggttactggtacctttacaataatgtacaatccaatgtttaaaaatgataccacttgagtttggtttgatcctataaactttcaacaaatgtcttgggaggccaaggcaggcggatcacaaggtcagagatggagaccatcctggctaacacggtgaaaccctgtctctactaaaagtacaaaaaattagccaggcgtggtggtgggagcctgtagtcccagctactcaggaggctgaggcaggagaacggcgtgaacccgggaggcggagcttgcagtgagccaagattgcgccactgcactccagcctgggcgacagagcgagactccatctcaaaaaaaagaaaaaagaaaaaaaatttttttttcaacaaatgtcttaaaatttaaaagcaggctgattagtttggaaccagactacaagtagagctaacatttggtgaataagaaaacatcacactacattttggatgtatgaaagaaaacttgaccatgtgaagatatatgaataaagaaatgtactatagatactactttaggaaaaaaaagagtgatctataaataaaaacatttgacgtatttgaaaacgtgtgggtcttgcatacgactcacatgataaatctaaaattcaacctagcaatggataagaattaagaacggatggtttgggcaaaggacattaacagacattgctccaaaggtgatacataaatggccaacaagcaaatggaaagatgcttaacattaccgattattagggaaatgcagatcaaaaccacaatgagataccagttcaggcccattaaaatggctattatcaaataaacagaaaataacaagcattggtggacaaactggaaccctcctcctgcattgctggtgggaatgtaaaatgttgcgtccattgtggaaaatagtatggcggttcctcaaaaaattaaatatacaggctgggcacagtggctcacgtctgtaatcccagcactttgggaggccgaggtgggtggatcgcctgaggtcaggagttcaagatcagcctggtcaatgtggtgaaaccccatctctattaaaaatacaaaaattagctgggcatggtggcaggcgcctgtaatcccagctacttagcaggctgaggcaggagaatcgcttaaacccaggaggcggaggttgcagtgagcacagattgcgccactgcactccagcctgggcaacagagcgagactcggtctcaaaaaaaaaaaaaaaaaattaaacatactgttaccatatgatccagcaattctactactaggtatatatcctaaagaattgaaagtaagaactggagcgtgcaatattggttttctgttcctgtgttagtttgctaaggataatggcctccagctctatccatgttcccacaaaggacatgatctcattctttttttttttttttttgagacgaagtctcgctctatcaccagggctggagtgcagtggcacgatcttggctcactgcaacctccgcctcccgggttcaagtgattctcctgcctcagcctcctgagtagctggaattgcaacctctgcctcccgggttcaaatgattctcctgcctcagcctcctgagtagccggaattacaggcagtcaccaccacacccagctaatttttgtatttttagtagagatggggtttcaccatgttggtcaggctggtctcgaactcctgacctcgtgatctgcctgcctcagcctcccaaagttctgagattacaggtgtgagacaccatgcctgaccatgatctcattctttttcatggctgtatagtattccatggtatatatggaatatacatgataagtcactctcacttcagttggctttcatgaaacactgtgacaggcacaagaggacaaagtgtctgccggcatcgttctcctcctacctcattgactgaactttgctgcttccactcctttgcatgacttccaaatatcagaggaccttagggcacagcttgtgcctcttctcttctctacttataggatattctctgcctagtgatctccaccagcctgtggtatagatgtacctgtgtgcttgtgactcaaagatgcacacctgcagtcctgagctctatgcccagacgtgggttctccacttggatgtctaatggccatctcaaacttagcatctccagaccgaaaaccccaaatctgttatgttattcccccaaagcccaaatccataacttccccttggcatctctcccccaaatccctccctcactgcactcttgcctttccctcctccaacaagccaagcttttcctaaccacagggcctcttcaggaacagtttcctctgcacaaaactctgttccccagacagatcctttcacctcctctgaggctctgaacgcctcccttcccacctctgcttctcactccttcacattagtctgtttcatttccttcattgcacttattatcatctgaaattatgtgttggtttacttattttctctcacacttgattttttttttttagaccgagatttgctctgtcgcccatgctggagtgcaatggcacaacttcacctcactgaaacctccgccttccgggttcaagctattctcctgcctcagcctcctgagtagctgggactacaggcgcccgccaccacgcttggctaatttttttgtatttttagtagagatggggtttcaccatgttggccagcaactgtgcctggcctcacacttgatttttaatctccatgagagcaagcactaggtcttgcctgggcctttatcaatagcagtgagcatagcacctggcacagaggtagttctgaacattaattattgaatgaaataaaataatgaatgtaggctgggcgcggtggctcacgcctgtaatcccagcactttgggaggccgaggcaggcggatcatgaggtcaagagatcaagatcatcctggcctacatggtggaaccccgtctctactaaaatacaaaaattagctgggcatggtggcactcgcctgttgtctcagctactggggaggctgaggtaggagaatcacttgaacccaggaggaggaggttccagtgagccgagatcatgctgctgcactccagcctggcgacagagcaagcctctgtctcaaaaataaataaataaataaattttaaaaataatgaacgcaggcccaagaagagttgtgggaaatggggtgatatttttgcatagacttctaaggctaagaaggaaaacaaacagacgtggtgggcacaaatctacccccaccccaactgggtcccaactctaggctctctggcctggcaccaccactgaaaggccccgttccccaaacctcagggtattcttagtccctcctgttcccagcgctgccaatcccccgcccacccccactttagttgcgtgttccagcctctccgccccgcccctccccgccctgaaacggacgtgctttttagaggagtccactgggcttggagtcagtggcaataaccaggggcaataaccaggcgtgtcccaggggggagccccgctctgcagccctgtgcgccgtagagagctggacttaggctggcagcatggccgagttcagggtcagggtgtccaccggagaagccttcggggctggcacatgggacaaagtgtctgtcagcatcgtggggacccggggagagagccccccactgcccctggacaatctcggcaaggagttcactgcgggcgctgtgagtgcgtgggagtggatggggtggaggtgaagggggcgagcaggagggtccggcctgacgcatacttaacctcccctcaggaggaggacttccaggtgacgctcccggaggacgtaggccgagtgctgctgctgcgcgtgcacaaggcgcccccagtgctgcccctgctggggcccctggccccggatgcctggttctgccgctggttccagctgacaccgccgcggggcggccacctcctcttcccctgctaccagtggctggagggggcggggaccctggtgctgcaggagggtacaggtgaggggcgggccgggctggggctgcagggggagcacaggaaggggtaggggactgggggttggggagaagggcaggtgaaatggagaggtgagctggtgtggccacagagtagcgggcagaggagagggaatggcggagccttggggagcgggaggtagcagcctggtgtaggagaaactgtacttatgggaggaggggacctggtagagggtggcaatcgtggagactgtgtggctggtggtagtgatggtgagtttctctccccaccccaacctactccccttctcccacagccaaggtgtcctgggcagaccaccaccctgtgctccagcaacagcgccaggaggagcttcaggcccggcaggagatgtaccagtgaggagggggttactgatgggggagggtgtgcccaaacgatgaggggcagcttgagtgtcctggtcatgacagagattaaaagcccctgcctccacctctcctatcaaagctgctcctgggatcagcagcgtctacaggaacgtattagaaatgcaaattctcaggccacctccaacctactacgacactgagggtgtagagtgggaatttttgttttgacaagccttccagatgactctggtggccactgatgtttgaaaaacactgctctagggccaggtgccgtggtggctcacacctgtaatctcagcactttgggaggctgagggaggcggatcactggaggtcgggagttcgagaccagcctggccaacagggcgaaaccccatctctactaaaaatacaaaaatcagctgggtagggtggcgggcacctgtattctcagctacatgggaggctgaggcagaagaatagcttgaacccgggtggtggaggttgcagtgagccgatcacgccattgcactccagcatgggggacagagcaaaactccatctcaaaaaaagaaaaaaaaaaaggaaggaaggaaaaggaaggaaagagagaaagaaagagagagaaagaaagaaagaaagaaagaaagaaagaaagaaagaaagaaagaaagaaaagaaagagaaagaaactgctttaaatgccttacctttgctggtgtcttccttgccctgggactttttcatgcatcggcttgttgtgtcctcccagaaatctgagtagagccagaaacacgcccttcaagccccaggaaactcaccctccagggctagcaaggggtgagatgggggctctctctgtgctctgggctcagcattggagatcacaggggaaaactgggacttggagataacagaggagttggggccgctagtgaggattcccttggcacaaagccaggaactgcattcagaaacagattttcaaaagatcttgatccggccaactcatctgctatctaaagcctgggctgcaggcttttgctcctggtctgtgggatcagagcagccacaggctcatttggttcctggtgattctccatgtgtcatgaattccacccctaaggaaaccattgcaccaaatctggcagcaacagccccaagagagggaatagacattgagatctactgtgtccatggagacccagagtcagcctaggccctgccaaaacgagctgtgagatcttagaccaattttttcatctcttcaattcttattttcttctgtaaaagaaactaagaataccaatctcgtttgggttaggaggaacaaatgagaaaatggttaagaatgtaggtggtcagctgctaagtcttgcacaactgtgtgctcttgctgttgttcctgtctttcagttcactctgttccaacactctaggctcttataaaacgtacagtgaggtctcagatccattgcaacagcattgcctgggagcttgttagaaatcagaatctgcatttaaccaagatctctatgtgagagggattcaagtctgagaggaagggtttggccaccacctggtggcagtgtactttaattgcaaatttttctttgaagttgaaagctcaaacccaaaagcaagttttgaatgaatcaaagaatgaatgagtgagagcatgactggctaggggtcatcaagtttgcagatacatgaatttaccatttccctggaaggtctttggctgtgttgcttgtttgagaatagaatttagagatgcctcgggcggctccccctaaactatgaaggctgaagtgcctctctatgggacacctaccaaaggcaactgaaaccttctgcgcagcccctgtcccaggatagtctcgcctctacaagatgcgtctgtgttagtcgggacttctatagttgcaagaacaaaagctaactccaactagcaggcagaaaaaaagtttgtcggccagacacagaggcacttacagaaacacaggcaggaattgtccacccagtggaaaatggccataactaacagtctgtgtttactgctataatctacatatccagagagagaccacctctctggctcagccccaatggcaaattccctggaaaggactctgattggcccagctctagtcaggtgctcaactctggaccaatcacccttgaccaggggagccatctcactgtgggaaaatggcagctcccttgcagcctccttgggtagaatggaagggcagctcccaggagggccctcttggctgaaggggtctggctgtgaccaggccccccaaggggactgccactccatctgccctagcaaagagtctccctgaggcctcttgctgaccaccttccctctctaccctccaggtggaaggcttacaacccaggttggcctcactgcctggatgaaaagacagtggaagacttggagctcaatatcaaatactccacagccaagaatgccaacttttatctacaggctggctctgcgtgaggatgcccacccttccctgcccctgggcctcagatgccctatgacctctgccttctgccctcccctagtcagttcccccaccctcagtgatatgagtcacatagtcctgcccaggaaacagcctccttcccactaccaatcccacagagcaacagctaccttaggggtagtgactaccttgggcccggaggctggttcaggatcccaagaggcataaggctggctgacagggaagggtctcccagggcctcctccccactccccacccctcacatcccctggcagttttgcagagatgaaaatcaaggggttgctggaccgcaaggggctctggaggagtctgaatgagatgaaaaggatcttcaacttccggaggaccccagcagctggtgaggagcttgggccagggatcctgacctctttcctggggcatcagctcctgtggctgcccagagtctcagaaaaccaagcaccaatttgctatgtaaccctgatcaggtccttgctagaccttacttttccccacagagacaaaagagaatatggacggaggggatccctgaccttctaacgccttctaatacaacagacatttgttgagctgctacatatcagacaccgggttaggggctacatggttcttcacggggctcacagttgagcaggccagttggtgttaattagactcaaaatcaaataattcatttcactgtgaaacatgctcattggatccagtgagggtgtaaagggggcacctgccataccctggagagggccccaggaaagctctcccaagggggtgaactatgctgagacctcaaagttcagtaggccttagcagtgccaaggatgggccgtgggggcagagagcagttcggggaacagtgagtgtgaaggccctgaagacagaaggatcagccacctttggaggaaagaaaacaccactgtggtcaaagtgtaatgaacaagagaaggagagcgagagaaggagcaggaaggtgcacgggggtcgcacaggactttgtcggccatggcaggacttgcgtctttcctcagcccagtgcttgactggttgccagcaggggaataatgtggtcactgtgcactgctggggggcaagagactatgagaatctgctatgaggctctggctgtggtcaccagaggatggtggcctcagcaaggcagtggcaatgcaatggagaggatgggtggaccgagaggtactcaggatggagaatcaatgggatttgatatgtgaggggtactgccaagagaggtccccaggctccggctgggcgcagtggctcacacctgtaatcccagcactttggaaggccaaggtaggtagattgcatgaggtcaggagtttgagaccaggctggccaacatggcaaaatcccgtctctactaaaaatacaaaacttagccaggtgtggtggcatgggcctgtagtcccagctactcaggaggctgaggcctgagaattgcttaagcctgggagatggaggttgccctgagccaagatagccccactgcattccagcccgggcaagagagtcagaccctgtaaagagagaaagaggtggggagtgggggagagagagagagaggaaggaaggaaggaaggaaggaaggaaggaaggaaggaaggaaggaaagaaagaaaaggaaaaaggaaaaggcggaagctgaggcagacagatcacttgagcccaggagttcgacaccagtctgagcaacatggagaaaccctgtctctaccaaaaagacaaaaattagccaggcatgctggtgtgtgcctgtaatcccagctacttgggaggctgaggcaggaggatcggttgaacccaggaggcagaggttgcagtgagccgaggtcacgccactggactccagcctgggcaacacagcgacacagcctgtctcaaaaaaaaaaaaaaaaaaggaaagaaaaagaaagggtcccgagtctcctctgtaggcaactgggtgggggatggagctgccacttcccaaatatcaggcaatgggactgacctgagctgtaggaataatctgtatttggcctgcaacgtgttgcatttgaggctagtgagttattcagggggagtgtcaggcagacactgggatgcatgggctggggactatgatttgctgctgggtgaagaggcagtgactgaagacaaggggcaggggaggtaactctgaggacacactgtgaagattagccagaggcctgtgggagctggggtaaccccgtccccgtgtcccccaccccctgcaaagcacgcatttgagtgaccccgttcccctgtcccccaccccctgcagagcacgcatttgagcactggcaggaggacgccttcttcgcctcccagttcctgaatggtctcaaccctgtcctgatccgccgctgtcactacctcccaaagaacttccccgtcactgatgccatggtggcctcagtgttgggtcctgggaccagcttgcaggctgagctagaggtgaggggtgcagggatcttggctctgcacagtcccatctcagtgccttcacacccgtcccctactggagacagaggggcacactcacatttgttagggacctaccgcgtgctgcgtgccaagcacactctcccgaaacacactcctctcccagccctgaatcctctcccttctacaactgcacccccttcatttagaaaaccaggtggcagccccagatctcctttcttctgcagaagggctccctgttcttggtggatcacggcatcctctctggcatccagaccaatgtcattaatgggaagcctcagttctctgcggccccaatgaccctgctataccagagcccaggctgcgggccgctgctgcctctcgccatccaggtatgcagtcaggcaggggcagggcagcgtgaagaagagtcaggagaatggttggaagacactcatggctgcctctctccccacctgcctccccccagctcagccagacccccggcccaaacagccccatcttcctgcccactgatgacaagtgggactggttgctggccaagacctgggtgcgcaatgccgagttctccttccatgaggccctcacgcacctgctgcactcacatctgctgcctgaggtcttcaccctggctaccctgcgtcagctgccccactgccaccctctcttcaaggtcagtggcttgacaaggtggcccagcctgtgcccatgcctctgtgcctcttctaagcagcctttcctcacatggccctatccatgcaagctgggatgcagagcccccgtccgcttcagcagcatctcctggcacaactcccctggaagcctgctatccagcaggccctaagtaacataaatgcagcaccccagaaaggctctcgaagggagatcaggcagcatcaacagccgtcatagaagcccaaatcttaggaaggggaaggacctggggctggcaggtgccaaagtttgaacatggctttgagagaccaacaagttctctgcagatacttctggggtaggggagggctgggtgggaggcccccgtgctctagggtgggttctgtaggtttcctagaccctgctagctttcagacggcatggattcgaggcatctcctctgtgaagggcaggatggccccctcccagggtccacccacagtcgctgctcagattctctgatccttctagacttctcctgggtcccagatgcgggccctactctgtgctcttctgtactagctggttctttctgactatctgcagcttctgaggcctggcgctcagaggtgggctctggtggacggctccacattgccaggcccacaggccctggttttcctagtgccttccctgcctaggggctaggaaatcacaggatgccagagccggaagacacagggctcagccacatcagcacccacatttgacaaaacaacctgaggctcagggagaggaaggagcacgcctgagctcccagaacaagctgctggtggagcccagcaggaactccagggctcagacccctgtcccaggctgcctcctctcattcttgttgcctctttccaagtgacttgcagggctggtgcctgtgtgggggaaggtctggggccagaacaacccaggcctcccctagctctgccattttcctgccatgcagctgctgatcccgcacacccgatacaccctgcacatcaacacactcgcccgggagctgcttatcgtgccagggcaggtggtggacagggtgagagctgtgttggggagggagtaggcaggccactccttcaatgtgacgaatttgaggtcctggggtaggagtggcccatctccccgacaccagtgctacctcctgcttctggagcaaggtctgtaggacccaagagtcctgtctctcagtccacaggcatcggcattgaaggcttctctgagttgatacagaggaacatgaagcagctgaactattctctcctgtgtctgcctgaggatatccggacccgaggagttgaagacatcccaggctactactaccgtgatgatgggatgcagatctggggtgcagtggaacggtgaggggccgtccctggagagccgagggctggtcggggacgtgggaagacaggaaaggagactgaggccccagggaggctcacgttgaggaggagggccagacattcatgatgctaagcagaggcattcctcagagcgggtcggggttggaggctggacctgaacctggatgcattgcagctttgtctctgaaatcatcggtatctactacccaagtgatgagtctgtccaagatgacagagagctccaggcctgggtcagagagatcttctccaagggcttcctaaaccaggagagctcaggtacagggacctcagccctcaggcgcatttgagtgagcccatccccgtgtcccccaccccctgcagagcacgcatttgagtggccccgtccccgtgtcccccaccctcaaggctcaccctcaagcctccgcagcagggtcctcaggtccctggaagccccatcccagcccagctctccttgcaggtataccctcctcactggagacccgggaagccctggtgcagtatgtcaccatggtgatattcacctgctccgccaagcatgcggctgtcagtgcagggcaggtgaggaaaggccagcgcccgaggtggcaggctggaggtgacccagctcctcagcctcattctgccctctcggccttcagtttgactcctgtgcttggatgcccaacctgccacccagcatgcagctgccaccacccacctccaaaggcctggcaacatgcgagggcttcatagccaccctcccacctgtcaatgccacatgtgatgtcatccttgctctctggttgctgagcaaggagcctggagaccaagtgagtgtggggctgggggccaggctgggccaaattggggtaagagagggtgtgatgtttaccctgctggcccagacccaaccctgccatcaggtagcgggtccctttgccccactgaccctccagtgggacacatgagccttggacatttcacagtgaaggtcaaatggccaaatgcgatgatgcggagccactctcagtagcaaggggaacgtgtaattatgcttcttggaaattccgaattgagctttcattccccgaaagcttcctgcagataagctttacatggatatctgtttaagaggagggacatggatcaggccccatcgagggctacttcaggtcccacacttgggggctagggccagagctggctaaggcaagttgcagctgctcagatagtggggaccaggagtctgggatgcaggacctcagcagccgcctcacccaaccttgtggtggatcctcagaggcccctgggcacctatccggatgagcacttcacagaggaggcccctcggcggagcatcgccaccttccagagccgcctggcccagatctcgaggggcatccaggagcggaaccagggcctggtgctgccctacacctacctagaccctcccctcatcgagaacagcgtctccatctaaatcccaggggaacacaggcccagatgacatccctttgaccacatcgctctaggataactggcacccagagaaaaggactcctcagaaaaaacaggcccccatgtgcctctcctgggacaaccagactctgtaactcacccccaccaccatacacacacacaaaaacagaaacaaaatcaaaacagagaaagcagaaaatctaccaagaacagagtctcaggacagaaccactgagtcttttggaggctccaagcctcaaagtgcccgcagagcccaccttgagggttttgctagttggttttgttttgcgttttacagccgtggggggaagcacataatcccgccccagggcccactagcatccactgattggaccttatggtcacccaactcaaggacagccaccaagaagtggctgccaaagagactgggcgcagtggctcatgcccataatcccagcactttgggagatggaggcgggaaaatcatttgaggtcagaagttcaaggccagcctggacgacatagcgagactccacctctaccaaaaaataaaaattaaaaaacaaattgggcctggtggtatgtggctgtggtcctaactactcgagaggctgaggtgggaggactgcttgagcccaggagtttgaggctgcagtgagctatgattgtgccacggcactccagcccaggtaaccgagcaagaccccgtttctattaaaaaaaaaaaaaaaaaaaaacaaggccgggcgtggtggctcacacctataatcccagcaccttggaaggtcaaggtagagggatcacctgaggtcaggagttcaagaccagcctggccaacgtggtgaaacccggtctccacccaaaatacaaaaaatagctaggcgtggtggcacacatctataatcccagcaacttggaaggctgagataggagaatcacttgaacctgggaggcagaggttgcagtgagcccagatcatgccaccgcactccagcctgggtgacagagtgagactccgtctcagaaaaacaaaaatgaaaacaaaaaatacccaagaggttgattgtgacctactgtctcagctttaaagtgaacaaaacactgaaaaagggtcactgggagccaggcagaatgagaacacccagtcggcacaggcagtgcctatgtatactttcttaaaaacatcccctaaagttaaagacttgtacgttataaggcaggttccgtttccagagaatcagaaaacattgtcatatctctaatcatactttgctgctagatttcatcatcactgatggatttacatttcatacacattctttcattctgtttttcttttttttctggctcatagtcggtgagcatccattaaggtaaaaaagtgtcctttaaaaaaaaaaaaaaaactcccgtggcgacacctggtagacatcaccttaatcaaataatccaggtgagttcaggcgtggtggctcacacctgtaatcccagcactttgggaggccgaggcgggcgaataacttgaggccaggtgttaaagaccagcctggccaacatggcaaaaccccatctctactaaaagtacaaaaactagccgggcttggtagcaggcgcctgtaatcccagctatttaggaggctgcggcaggagaatcgcttgaacccaggaggcagaggttgcagtgagccgagatcatgctgctgtattccagcctgagtgacagggagagactctgtgtcaaaacaaaaaaaaaaaatccaggtgaacttgctgataccatgttgctttgctctaatgttgtaagaagagcacctcatctctgtggtttcttctagaaactcataactacagtctagtgatgagaaaaatacagacaaacccagattgagggacattctgcaaaatacttgaccagcactttccaaattttaaaattgcctttgcttttttggtgtaaaaacaaaatgcatcctttacaattcatctaatgatttccatcactactacacattgcaggcatgagtgcttttgtttttcagtttcactgatttttataaaacaatgtggacaaaaatgcaatttatatactataactgcataaacattaccattggaaaaaaacagaacagtgcctcagaaagggtagggctgactggcaagtggcatttgacatgctcattcctcgttgagagtgagtataccgaaagtgatttagagatatatgtatctgtcaaacttctttccatcaattcctgctaacttaagcaataaaggagttaatggaaaagaaatggagttccttgagaagttaaagagctgactatgcaggccaggcgcagggactcaagcctgtgatcccagcactggaagtccaaggcaggaggattatttgagcccaggacttcaagacagcttgggcagtatagtgagaccccatctcttcaaaaaaaattaaaaagtagcagagcgtggtcgctcacgtctatagccctggctattcgggaggctgaggagggaggactgcttgatccacggaggaagaggttgcagtgatcacaccactgcattctagtaatccagactgggcaacagagcgagatcttgtctcaaaaaaaaaaaaggccgggcgcggtggcccacacccataatcccagcactttgggaggccgaggcgggtgcattacctgaagtcaggagttcaagaccagccttaccaacatggtgaaaccccgtctctactaaaactacaaaaattagctgggcatggtggcaggcgcctgtaatcccagctacttgggaggccgaggcaggagaatcacttgaacccgggaggcagaggttgcagtgagccgagattgcaccactgcactccagcctcggcaacagagtgagaccccatctcaaaaaaaaaaaaaaaaaaagttaatcatgcagtttcaggaaagaaactgaaacccaggaagctccaggcatctgggggacaagggacaagaactgatggatgctgtcctcaggcactgccatgggaataatgaagcgcctaccatttttcatccttgagttatttgcctccatattcagttccgtgagagaggctgtttgacgtaacacggagcagcagagaccactggttcctggaacagagagagtttatgttcacccaatacctcatgtacttcccaacatttcccagcctgccttaaagttagattgaggccatgtgactaattctggccagaacactaattcgcagaggagtgatgtgtgtcctttccaagatgggacagttacgagctggtgtgcctccttcatccttctattgccccattgcctatccctcggaggcatttccagctgacctagccatcctgacctctattgctggacttccagttcaggaggacaaggttcacaactgcccatcacagcgccggcacactgcaggtgcttggtaagtacgtgctgaatgaaggaattaattcctgcacaaataattcctaaaaccctgtggtgcccatcgcttacctgtgtctccccaaccagactgtgagcttcttgaatgcaggagctgggtctcactcaacttgccaggcctcatgcccagcgctgcattgacacagagtgatacccaacaaatgtttgtttaatgttggatgaagggaaagtgattggatggttgcatgcgtggatgtactggtgagttggagggcagttgcaccccagtcaataaactggtgtttgtttcagtatatatcttttgggatcaactatcatttccaggagaaactgcagcgtccaaggcagcatagccgtgaaaatccaagcagtcagtccctaaccactcttggagaagccaccaccacctcctctgcccagggcctgtgagcttgtgagcctgtgaggtccccccgccacacacaccacacaaccctagccctagagctctcagctggcctccccgccttgagaagagaaggttcttctcttctacagagaacttcacctctacagagaacattctctacagagaacattcacctctagggatatccagttaatgctccagaatggtggcctccttgggctatgatggatggtaaatagatagaagatagatagtagatagatagatgatgacagatagatagatagatagatagatagatagatagatagatagtagatagatagaagatagatagtagatagtagatagaagatagatagatgatagatagtagatagtagacagatagtagacagatagtagatagaagatagatagtagaagatagatagatagtagatagaagatagatgatagatagtagatagatagtagacagatagtagacagatagtagatagaagatagatagatagtagaagatagatagatagtagataggagatagatgatagtagatagatagtagacagatagtagatagaagatagatagatgatagtagatagatggatagatgacagacagtagatagaagatagatagatagaagacagtagatagtagatagacagtagataatagaagatggatagatgatagtagatagatcgatagatagatgatagatagagagtagatagaagatcgatagataaatagatagaatatagtagatagaagataggtagatagatagaagacagtagatagatagtagaagatagatagatgatagtagatagatgatagatagtagagagaagatagataaatagatagaagatagatagatagatagaagatagatagtaaatagataatagacatatagccatgcattacttaacgatggggatatgttctgagaaatgtgttaggtgatttcatcattgtgtgaacaccgcggagtctgctaacacaattttaaatggtagcgcgtaccacacacctaggctatatggtctagcctgtcgctcccaggctgcaaacctgtgcaacacgttaccatgccgaatactataagcagttgtaacacaatgataatatctacacattgaaaaggtacaattaaaatatattgctaaaggcaaaaagtggtacacctaagtaaggcatttactgaaggccttggaaccagggatgccgatggtgtaatgaatggagctgcgggaccggaagtcgctgtgggtgtgtcagtgagtgcatggtgagggaatgtgagggcctaggccgtcactgtacacttttatgtgactggcagcacaaaattttacttagaccagcatcaccgcgaacatgtgagtaatgcattgtgctatgacatcatgacagctatgatgtcactaggcattaggactttttcagcttcattataattttatgggaccaccattgtacatgtggtccatcattgatcaaaatgtcattatgtggtgcatgactatagacagatatataaggagaaattaggggaattggctcacgtgattatggaggcggagaagtcccactacaggccgttcccactacaggctgtctgcaagctggagaccctgggatgccagtagcagcatggctcagtccaagtctgaaggctttggaaccacggatgccaatggtgtaattctcagtccaagaccaaaggcctgagaatacttccactggtcagaggaccactggtatgggtcctggagtcccaaagccagagagccagggttctgatcaccaagagcaggaggaggagagtgtcccagctccaggacagagagaaagggaggaaatccttttctcccttttttcgttccaccaggacccacaatgattggatgatgcctgccacattgagggtggatgtttcccactcagcccactgactcacagcaatctcccctggaaacaccctcacagacacaaccagaaataatgctttaccagttctctcggtattcctcaatgcagtcaagttggcacttgaatgcattaatgatgaagtgttatataatataggtagaaaacaagtcacaccatgagaagcacatgatcccttttgttttttgttttttgagacggagtcttgctctgtcacccagcgagacatgccaccatgtggcatgatctcaactcactgcaacctccgcctcccgggttcatgccattctcctgcctcagcctccctagtagcttggactacaggcgcccgccaccatgcctggctaatcttttttattttgagtagagacagggtttcaccgtgttagccaggatggtctcgatctcctgacctcatgatccgcccgcctcggcctcccaaagtgctgggactacaggcgtgagccaccgcgctgggcccccttgtgtgttttttttttaagtgaagtatgtaaatcaatagaaatggcaaggaaagatctggaaagaaggatgcacacctagctgttgcttgagaaggagagtgggattgtacagcagggccacattgaggagtaaagaagtgggagccttaaactaagagagagagagagagagaaagagagagaggtgaaaccctgaaaaggagatctatttgattgcttgaggtactcacagggaacagccttgttaagaaaaattatccaaaactgatgaatagaatcaagaggacaactgcctgtccttttaaagatgttttcttttctttaatttttggttttccttctttcttttttttgggggggtggtttctggtttttgagacagagtctcactgtgtcacccagactggagtgcaatggtgccatctcagctcactgcaacctccgcgtcccgggttcaagagattctcctgcctcagccttccaaatagctgggattacaggcacccaccaccacacccggctaatttttgtatttttagtggagacggggtttcgccatattgaccaggctgatctcgaactcctgacctcaagtgatcctcccacctcggcctcccaaagtgctgggagggatgctttattttctagcacggcataccactgtttgacttttctgtgtgttattaataaaggcctcgatttatgtgaagttcatgtaaatgatttgttcctttttttaaaagcaaataaactggagattatagttcattgctctgtagaatgttgactagtttcatatctaacccaacaatcgtgtcctaacattcctttattaaattgcctgtaagtgcccggctcctcaattgttcttgaaaccagcatgaccatctggctgagtcgaataaaatatttgacttgtgaacattctaatttgtatgaaccatgtttttaatttgtttgaaatccctcccagggtggagggagagctgcttgtgccaccccagaacagtgcctagaaccccaatcccttcttctctctgccaggtcctcttccagcctcctctttatctttgtgcccgccttcccctcaccgcacccccatccatgttggacatcccaggggtgcctttgctcactaccccagggaatgagaaacagactcttctgtccccacccgcatcccccactgacctaagaaggtgctgaagcctgggacagagacaaaagtggcagaaatggagagggatgtgtgggttgaaatagggggcttggatgtgggcccaggtggttgaggaccagcctacactgtgcccatttaaagattaatagtatatgctttagaatagtgctttactaatatgattatgaatcataagtataatagcttgtgcttagtacaacaataagagaatcaggcggtgagcttgcttgactgaccacagagtggaacaaacaaccacaggaagtctgcggagcctctgagcaagaaagttggcttattgctcaaccttccacttgagtgcctgaacaaaggtctcatgggaagggaagcgacccctgctccattacccgggagggtactgcaggaggctgctggtaaaagaggagaagtcctctgcagtagggttaaggaggaagcctcctatctcccgcatgttcccagaggcaaagcagctgctctgctgacggtgctcaggcgttgaccactcctttgatgtacaggcctgtgggtttgaagggctgtttgctttcacgtcctgttctgttctattagccgcttagttggactctgatgattatctgtaagttaaacatagagtattagcttacgtagtggaacagtaaatagtattaactggctaatgaccgacacagcaggctccgccacctctccctatgctcacccaatgatcacctcaccatcagcccaccctcagcctataggatcaaaggaactgtactcaataaatatcagtggaacccagagctcctggcctttgcaatctccacgttgcgatggatccttggacccacttttgttaactcttaaactttgtgtctttgtctttatttcttttctcattccctcgtctccaccgggaaggggagagcctgcgggtggtgtatcaggcaggttcccctacatctttggcacccaacacggtctccttgaacccaggtgaagttacacctgagcgtggtcgttgtgaagaacggtctgtccaggaactcccgagaacgtgtggtcggccttgcggtaagcttgtgcactcggagcattccagggacaccatgggacaatccaaaagtaaacattctgcatatttacattttattaagctcctcttaaagagggcaggaattaaggctagcacagaaaatttgattactctgtttccaacagtagagcaatatcgtccttggtttcctgaacatggtaccatggacttcaaagattgggaacaggtgggaattgccttaaaacaagtttgtaaggaaggaaaatttatccccctaacagcctggtcaaactgggctatagttaaagcagcctcggaaccgtttcaatcggaaaatgaggcttatcctccagcagaaagaatttctgcagaggaaggtggtgatgctgctgaaggaggagaggatagtgaagaagattttgaggaaaatacagacaaacctggagatgagttaatttcttttgaggagcacgtgggaccttcagctgctcctaaaatagagaagccatatatgccaagatgtttaaaacaaagaagggccttgaggagcagtcggctcctcattgggatcatccggagtggccgcctccaataaagcaatgtagcttggagccttggaggtctgaatctcaaatttgccctgtttcacgaatgaatgaattgtggcctcaggaaccacgagcgcatggtgtagcaccagtacaacataaggctgcactgccatctaatgttaatgaatcgccattacagtttactattcggcaggctagattagccggagatcttgatgcctggcagtttgcagtagttttgcaacccccacgacagcaaggtggagcccatcaagcggtatgggaaccattttcttttaagctgctcaaagatcttaaagcagctgttggtcagtatggtcccaattcgcctttcatccgatcgctattgcaatctgtggctcagaataagctattgactccgtgtgattgggagattttaacgaaagttacactttcgccctcccaatttcttcagtttaagacttggtggaccgacgaggctcaaaatcaagatcgaaaaaaccgtgctgctaatcctgctattgccattacatttgaacaacttctaggaatagggggtcaatggggaactgtaaacaaccatcaggacttcgagatgatgccattgaacaaattcgcaattgctgtttgagggcatgggagaaaattcaggatctgggaactacttatcagtcttttaattctattagacaaggctcaaaggaaccatatcctgatttcattgctcgccttcaagacgcagcacagaaggctctcactgatgaaagtgccaggaaggccgggtgcggtggctcatgcctgtaatcccagcactttgggaggccgaggtgggcggatcacctgaggtcgggagttggagaccagcctgaccaacatggagaaaccccgtctctactaaaaatataaaaattagccgggcgtgatggcacatgtctgtaatcccagctactcaggaggctgaggcaggagaattgcttgaacccaggaggcggaggttgcggtgagccgagatcacgccactgcactccagcctgggtaacaagagcgaaactccgcctcaaaaaaaaaaaaaaaaaaagaaagaaagaaagaaagtgccaggaaggtgattgtagaattattggcttgtgagaatactaaccctgaatgccagtcagctattcacccagtgaaaggaaaggttccggtgggagttgatgtgattaatgaatatatcagggcatgtaatggagttggtggaatcatgcataaggctatgataatggttcaagccacgacagagttaaaagtgggaggtccaattaaaaacttttcaggcaattgttacaattgtgggcaatttggacacacaaaaaaggaacgtaagaacaaatcgaacaaacaggcaagatataatcaaataaaagaaccacctggcttatgtcccaggtgccagaagggtaaacattgggctaatcagtgtcacttcaaatttgacaaaaatggccaaccgttacaaccgcagtcgggaaacaggaagaggggccagcctcaggccccgctccaaacgggggcattctcactccagcagttggtccctcagtcggtcattgcctctagtccaaccaccatcattgtctcttgcccaaccaccacagtaacacaattggcgccagctacagcagggagtacaggcttagatttatgtttcccaaaagctatctctctgcttccagggaaatcccctcaaaaagtccccactggagtatttggccctttacctgatggacagttggacttgttttaggaacatctagtctaaacttaaaaggagttcagattcatactgggctgattgattcagattttgtgggagaaattcaattggttattagttccagtattccttggagtgcaaacccaggagatagaattgctcagctgttgttattaccttatgtaatagtagaaaaaagtacagtaaaaagagaaagtggttttggcagtactgacagtgaaggaaaagcagcctattgagtaaatcaagcttctaaaaacagacctgtgtgcacaatgattcagggaaaacagtttgaaggactggtagacacaggtgctaatatttcaattatagctctaaatcagtggccaaaagcgtggccccgacaaaaggcttctatgggcttgattggagtaggcacagcatctgaagtctatcaaagtgctacaattttacatcgtttaagaccagatgggcaggaagtcaccatccaacctatgattactttcattcccattaatttgtaggggagagatttgttacagcaatggggtacagaaatcaccattccccctgcaatttacagtcctgagagccaaagaatgatgaccaaaatgggatatattcctgggaaaggattaggaaaaaaatgaggacggaataacccagccgattgaggtctcagttaaatttgaccgaagaggaattggatatccttcttaggtgcggccactgttgagcctccaaagcccattgcattaaaacggaaaactccaaaacctgtttgggttgatcagtggccgcttcctcaacaaaaactggaggcattacattcattggcaaaagaacaattagacaaaggacatattgaaccatctttttcaccatggaacgccccagtttttgtaattcagaaaaaattcgctagatggcgcatattgaccgacttatgagcggttaacgcagccattcaaccgatgggagctctccaaccagggttgccatctccggccatgatcccaaaagaatggccgatggtaataattgatctaaaagattgtgttttttactattcctttggctcctcaggattttgagaaatttgcatttacaatacctgccatgaataacaaggaaccagctactatatatcgatggaaagttgtaccccaaggaatgttaaatagtcaaacttttgttggaaaggttattcagcttgtcagggatcagtttcctgattgctatattattcattatgttgatgacattttatgtgctgctgcaagcagggacagacggattgagtgttttgctaggctacaagaagtggtgggacttacaggtctcgctatagcaccagataaaatccatactacaccctatcattacctgggaatgagggtacaggagaaaacagtaaagcctcaaaaggaggaaattcgtaaagagtccttaaaaaccttaaatgatttccaaaaattattaggggacgttaattggataagacctactttaggaattcccacctaagcaatgtctaaactgtttgctttgctgagatgggatccaaattcatgtagcaaaagaactctgatgcctgctgcagctgaagagttacaaatgattgaggaaaaaattcaaagtgctcaagtccgtagaagagatcctagtgttccattacagctcttagtgttccctactctccattctcctataggagtgattgttcaaaatgttgacttagttaaattgtcctttttaacgcacagtacgactagaactttctcaatttatttagatcaaatagctattcttataggccaaatacaactgagaatagtcagactcattggcaccgatcgagataaaaatgtagttcctttaaacaaagcacaggttcgacaagcctttattaattcgtcagaatggcagtcaaatctggctgattttgttggcagtatagatattcattaccctaaaactaaaatgtttcagttcctaaaaattgactacctaaattttacccaaaataactagttccattcctttggagggagccgtaactatctttactgatggctctcagaatggaaaagcagcttatacaggaccggaagaaaagattattcaaactcagtttcattctgcacaaagagctgagctacaagcagttatatctgtattggaagattgtaatcaacctgttaatataatctctgactctgcttacgtattccaagctgccaaaatggtaaaaacagctttagtaaaacatatttctgatgatcagttaaatttcttgtttagttcacttcaacaagcagttaggactcaaaattttcccttttatattacacatatttaggctcacacaaacttaccaggacctttaaccctattaaataatcaagcaaatttattagtgacgcctgttctaacagtgtccggcctctgagcccaagctaagccatcatatcccctatgacctgcacgtatacatccagatgccctgaagcaactgaagaatcacaaaagacgtgaaaatggctggtttctgccttaactgatgacattaccttgtgaaattccttctcctggctcagaagctcccctactgagcaccttgcaacccccgcccctgcccgccagagaacaaccccctttgactgtaattttccactacctacccaaatcctataaaagggccccacccctatctcccttcgctgactctcttttcggactcagcccacctgcacccaggtgaaataaacagccttgttgctcacacaaagcctgtttggtggtctcttcacacagacgcgaacaaaagctcaaaacttccattccctaattcatgtaaatgctgctggattaaaaaataaatattcatttacctggaaacaagctaaaaatatagtacaacatcctcagtgccaagtgctacagctacccacccaaaaacctgaaggtaaccctagggggcttcaaccaaatgcagtgtggcaaatggacatgactcatgtcccatcattcggaaaactttctttcgtacatgttactgttaatactttttctcggtttatctgggctacacgccaaactggagaaagcacagctcacgtaaaacgacatttattatcttgttttgcagtcatgggtgtgccacagaaaggaaaaatggtctggtggaaggataccagaaccaaaacttggaaattaagaaaaagtattacttgggggaggggttttccttgtgtttcaccaagagacaatcaaacactcatttggatacccaatagacatttaaaattctacaatgaaccctacaccgaccggtcagaaaaaaggaaagaatcaaaagagaaagaagaccggtcccttcgacctgtcttttcgggagctgaggaaaatggtgaagctgagcgtctcggagaaaaaacagaagacggagaagactcgctaggctacaccactgacatggggacagataaagaagctgactcaattggcagaggacaccctaaaggagaaacaactagcgattacaccgggtaatatgatcttggctgccttgatggtaatcaccacggcggtaagtctctctgctgtttcagctaagcaaaattttactactgggcttatgttccatttcctcctttgattagacctgtcacttggatggactcccctactgaagtttatacaaatggtagtatctggatgcctgggccgacttatgatagctgtcctgcatagcctgaggaggagggcatgttaatgaatgggataattgggtataaataccctccagtttgtttaggaattgctcctggatgtttgccattacaaatacaaagttggatggtctacgtacctcctcataatcgttctcaacctagttatcacgtagtgagtggaatgtcttttcaacccatcaggactgtaaaaacttaaggggatagttattatcagtcaaatataaaagtccaaaattgcaagcctaagggattggcttgccctaaaaggaatccagaatggtcagaaaaatgagaaattcttacttgggaggtttgtgtggcagataatgcggtagttttgcgaaatggttctcatggggtcattatagactgggctcctaaggaatcttttgctagaaattgcaccggacaaaacgctgggtgcgctggggactcctttatgatcgaatatagaaatgatccatataatccccccactttagttagaagatttgaatcaacatacccattaaagtgggaagataaagatactgctccccctccaccaaaaattagtccggtcgtgggtctggaacatccagaattgtggaagttgcttatggcgacctccggaatgagagtgtggaaaggggaagcgtcctggggaacaaaaggtaataagccactctttactatgccttctccctctgcccactcccccgccccccgaaaggaagacctccaggtgacgctccctgaggactcgggccaggtgctgctgctgcgtttgcacaaggcgtcccccgcctcccctcccctctgccacccctccccccgccggcctccccgcctcccccacctcacccctaccccctccgccccccgccccccgccacgctgcctcgccccctctaggtccggcccagactccggggtctgccgctgggtccagctgaggctgctggggaccccctccgctcccccttaccagtggctggagggggcaggcaaagggcagggccggggctgcaggaggggcatggagggagcgagggggaccagggtggtcatgggtcaggggaggggggctggtgtggacacagtggggaggggggaggcagaaaggtgacatgaggggcacgggaaggaggaggtgggatggttgggaggaaccatactcagggaggggaggatggaagataagtgggggaggggagcaccggctctgacaagaggattaggtggggaagttgagtggtggatcagtgagtggaagagggagaagctggtggaaagagaacaggcctgtgaagcagaggggttgggggcagaacatcgtggcccagtattgggggtggtgggtgtagctatgtcttctctttcctcttcccaccgactttactctttggtcccctctggcctgggctgttgagttggggctcagtgaacggatggggacgacctcaggtgctgaagcaggtgctgaagcagggtctgccgtggggggaaggtggagtgggcagggcttctccatccctgggggaagaggcaaagcagacgcagaggccaggggctggccaacaccctggttcaaagatgctcccaccccaggtctggggagaggaggggagaggctgggggctaagatctccctttctgcacctggatcccctccacagcctgggccattctgtctttgtttctgcaggaacactgccctgaaactgcaggactgctgggcagccaggggtctggaaaagggatcagtgtaccttcatcttccccacaccaaggtgtcaggtccgcagggtgagggaggaagggcgaggtggctgcagcagggcaagagggtccttggtggcaaccttgtgggactgagaaccagaaagccaaaattagaacattctggaaatcacaggacttgttctgtgctgccaccagttcctacctgtcctttgaagaagctcacttctgccctgagaatgtgcacgtcctgccattgtgctcggctcactgcaacctctgcctcctgggttcaagcgattctcctgcctcagcctcctgagtagctgggactacaggcacccactaccacacctggctaatttttgtatttttaggagagacggggtttcaccatgttggtcaggctggtctcgaactcctgacctcctgatctgcccacctcagcctcccaaagtgttgggattacaggggtgagccaccacgcccagcccagcagtggcttctgtgtgggaagaaggtcagggctgaaggaccctgggaggatgccccacccaacatgtcctctctcatcgtggggtaattgcccatgtttgcccagccattctcacctatcagggcttccaaaagaatggccaaagtaagttctaacaactttgcttctttgccaaggcaagcaccaatgctacttttctgccctctctggatgcccgtgacttcggtcccacaggaagccaagctcctgaggcagctgaaattcagtcaggggactggggtctgtgtactgatctacaccccacttcatacctacttcttcaaactgtccccaacactgggaacacctgtccttgaatatcctcagcaatttaaggggaaaaaaaggctgaagcagaaagactttttccttccaaaattgtgcctgcttgcttgggggcctaggcatgcagacttgaaaataaatcaagcttgggtggggcatggtggctcccgcctgtaatcccagcactttggaaggccgaggcaggccaggcagggtgaggaggatcacaaggtcaggagatcgagaccatcctggctaacatggtgaaaccctgtctctactaaaaatacaaaaacaaaattagccagggtggtggcgggtgcctgtagtcccagctactctggaggctgaggcaggagaatggcatgaacccaggaggcaaagctagcagtgagcggagatcgcaccactgcactccagcctgggcgacagagagagactatagaaagaaaggaagaaagaaaggaaggaaggaaggaaactaagcttaggaggccgaggcaggtggatcacctgaggtcaggagtttgagaccagcctgaccaacacagcaaaaccccgtctctactaaaaatacaaaaattagccacgcatggtggcaggcacctgtaatctcagctactcaggagtctgacgcaggagagttgcttgaacctgggaggcagaggttgtagtgagccgagattgcgccacttcactccagcctgggcgaaagagcgaaactccgaataaataaataaataaataaacaaacaagcaaaccaagctggaagattcagtagtgctcactctccaatatccttgttgccgctgggtgcacgatgcatttaaactatacaggtcaaactcttggttcagaaaccctagcaccagtgccacgccccaaagcaatgcaacctcttattaaatgatcactctggtttaacaaatcatctacactgccttgtgacaaagtagcaggagaatgggacccgggactggtgagttttggcagggaatcaaaagggcctctctgagcggaagcccggaaggacgggccgttctggtatccagcattctttagtattccagttttctcaaattcaacttatcctaggtgaggtcttagtgcacatcacagagcatgttaggcttccctcaaaacgggtggggccaagggagttcagatgactcctcaggcagaaaccaaacctgcgatcctttgttgtctaagaaaaccacttggaaaagtaaagtcatccaacccgttgtgctagagaggagggaagcccagcccagccatcagcatcaggaagtggctatgctgggaagttggagatgggtctgacagtggtggccatgctgcaggcagaggaccagggtgactctccccacgcctaccctctgcagagtatgcatttcagactagaaggaggatgaggacacctttttcgcctccttcacctcctagtttctgaatgacctcaactccatcctgatccactgctgtcactgactcccaaagaattttctggtcactgatgccatgatggtccctgcgctggaccctgggaccagtctgcaggctgagcgggcgccagtggagggaggggcattgttctgagatggtgagggctgaggggcagggctgagtgaggaatgtgctctctcctgctactttgccaggagccatgcattgacaggccctcccagcacagaaactatagtgatgcgttggttgccatggtttccgaggatgctctgcagctaatctgagtgccccccagagctgctgctctcccctccctgggctactgggatggggtgtgctgcgaccccaggagggtgcatttcgtgctgacctccagcggggcgcgcttctctcactgtctctcactgatgcttgggcctggccacagtagagtcaccttcaatacttgggtgggggaagaggggaggggcttctttctctggaaccacaaagtggctctgagttggaacaccccactggctccagagaatgaagttcctttaagtgaaatactcccaggttcataataactcccccttcctcacccaagcctgctcagccctcctcctcctccactcctcctctaaaggggctctctgtacctggtggaccatgccatcctctcaggcctctaccccagcatcattcatgggaggccctagttcatgactgcacccctgatcctgctgcaccagcgtcccaacggcaacaggcccttgctatcccttgtcattctggtcagccaggcagggcctcggtgggctggtgggtggggtaggggaagtctattacatcctcgggatgactgaaaggttgcctcctcccaatgccactgtgcctggtgacatcacctctccaatcctactcagcccctctcaagtttgtctttctgttttgtcctctttgatttccatcttgatagaaagtttatgatactcaagagaacaaattgccccttgacagggtgtcagaatcgattgtactaagtcacgcacctttggcagttcaaccgtgttcctaatagttaaaaccataacccattcgggaggtgtccacaccgtcccttcccatccttccagtctgccccacacaactggggctctggatgactggactggtacagggaagtcagccaacacgatgccttgggtcacttcacctctcaaggagattattctcatcaaccttgtcttactaatgaggaaactgaatcacagagaggttaataaactttcccaagttcacacagctggtcaaaagtcgtgtgattttgtagcaggacgagccgcagacaaaacccctcagacatcaagttaaagaaggaagggctttattcagccaggaccatcggcaagactcgcgtctcaaaaaccgagctcccagagtgagcaattcctgtccctcttaagggcttacaactctaagggggtctgcttgagagggtcgtgatcaattgagcaagcagggggtatgtgactgggggctgcatgcactggcaattagaacggaacagaacaggacagggattttcacagtgcttttctatacaatgtctgtaatctacagataacataaccgattagattaggggttgatctttaactaccaggcccggggtgtggcgcagggctgcctgcctgtggatttcatttctgccttagtttttacttcttctttctttggaggcagaaattgggcataagacaatatgaggggtggtctcctcccttattctggccccatggacgtggtgatgggctgcccttccccagtttctgcccaatgcctgccctctcctgtgcccccactccagctcactcagacacccagcctagacagccccatcttcctgcccagtgaccccagctgaagactggttcctggccaagacctgggtgtgaccctgaaagttcctgttgcacaagacggtcactcatctacttcaaacccactttgtggtggagcttttgctttgtccatgctgtggcagctgcccatgagccacccattttcaaggcagggaggagccctcctctcagtgcccacagctgtgggagacccggggctgcctgatctgacctctgactccggcttcccctttcttctgcaccttccacatcaacatccagcccgcactgggctctttgtaccaggaaagctcatccaccaggtcaaggccctggaggcctgggatcttggggtgagcacagagggcctggggaggcctgagatttggtccagagcccctcctagcagcaggagtgggctctctgctcattacagtcaacattgttgggacagatgggctgcctggagctgatcaccaaagggctggcagctgccagctaccactccctctacctgtcccaccagctggctgacttcaaggtccaggacctcgcccgctactacactccagatctgggcagccatagagaggtgacactcccctggggcctgagggctccaaccctctcaccctcggctagacccctgttggtttattcaaccttcccccagcctccttcccaaacacactgctgtctccaagcccttcctgtttactcttgatccttcccagctgtgttgggaagttatttaacctctctgtgcctgtttcctcatctgacaatggggtaataagagcacctatggtatagcttattattcttattcaatccaaaaccctaagaacaaaccccagtgcacagaaagtgctctcggagattagctattaagattattatgccgggcgcggcggctcacacctgtaatcccagcactttgggaggctgaggtgggcggatcacttgaagtcaggagttcgagaccagcctggcctacatggcaaaaccccatctctactaaaaatacgaaagttagctgggtgtagtggtgggcgcctgtaatcccagctgctggggaggctgaagcaggagaatcacttgaacccaggaggcggaggttgcagtgagcaagatcgtgccattgcactccagcctgggcaacaagagcaaaactcggtctcaaaaaaaaaaaaaaaagattatttttcaccccatagataaagtcactgtgtctccaggtttttccgttgaaatcttcctcataggagactgccttggggtatagctgtggcctccaccccaatggccagatcctcttaatatctggcctcccacgggttcccagctcctgccaccagcctgcataatggcctccctccagcaccgagattgatggcggtgccgctgcccattagcctccagtggtgcccagtggctcgccacatgcaatgctgcattccctgccagctcagcccctctgaaatctgcccctacttccattcttccacctcagcacacactgggcctagggagacgaggcaccctaatttctccctttctcccaattcaaattctgcccctgcttcaagcccaactcatgtcccacctcccccttgaagacctcagggactccccctatatgaacatccacagcaggagctccttcctcagcaggggtctgcacatcctactatggctggggatggagggccctttgggaaccagtggatgagatgaacccaatcagccggtcctgaggcagatggacctggtgtctcatccttccctgtgggttggaatccaaatgcctgcaggaccagtgagcagagaaaagctaaggaagaagagtgggcagggaccgtggccagtgggaaactcatgtttgtctgatggggacagtggtgacccagctatcactgtgaccagatcttctgatttttcagcagaaaccagacatcttctaatatttaaacgttggcaagtgattcaacttgaaaaacaaacagaaaaaccttgccagctgatcaaaacacatctgcagatcaatcatggccttcgggcctctgtttgcatggcatggtgaagagcacagcctcccggtttgatctcggctctgcagttcactctgtggttggccgttttccttccttggcctcagtttccccctttgtgggcagcaggtctcagtggccccttccaacccatacccctgtgcagtgttggctcccggctgttagtcaccgtgtattcccgaccccccagctttgggaccaatattgttaacatctactacccggacgatacggcagtgagcagggactcagagctccaggcctgggtcagggagatcttccaggagggttttccaagccaaatgctctcagaggtggcgtccactgccccagggcagcagcctcttgggtctcagctctgttctctctaccctactcccatctagggggtcccctccaccctgggccactgtgctgggctcatccggtgtttcacgacgatcatcgtcacctgctcagcccaacatgctgccatcaacagcggccaggtgagccactgccagaccagggggacaagcagggtcacgggaggagcagccctagcagcactggaagctctgtactgagtttgcgggggtcggtctgaattcagtgactggatccccaatattcctatcatcctgtggcttgccctgcccaccgccaagggccagacagaacaagcagcctcactccctgcggtcgatgccacacaccaccccctgctgctcctgtggggggtcagcaatggaaccaaggccaccataagcaaggcccaggtggggatggctggggtctcagcttctagagagtgggaacattgaggaagggatcctggggacaatggctactaggaggatgcacttagcttagcaggctgggctcctaggtggcagggcttgtggccactaggttgctggtgggtgtggtttagggtgctgtggattcctagtagggggagtttagagtggtctgggcttcagagtgagccgggcttggggtggtctgggtttcttgtggcccgcagtcttttgtctaggtgggcgggtgttttatgtttcaagttggatgggtctggagtgctccaggacccctacgtgggctgggcttgggtggactaagtcccctgggagggagacttaagctggaacagaatcgttgtgggctgaaaatgcagccggccaaggtcccagcctttcggtctcccctcctggacacctacccagaggagcacttcaccgagaaggccccgcggcagagccgcctggcccagatctcggcggacgtcctggagtggagccggggcctggcgctgccctactcctacctgaaccccgcggccgcagagaacggaatcgcggtgagagcgcgcggcacagcctgcacctgcaccccgcggcgccagccctgccgccagcgccccagtaacttgccgcgcgcattcacagccagacccagggaaaggaaggttttttgtttttttgtttgtttggtgttttggtctctgaggtttttgtgttttttgcttgtttgttttgttttgttgaaaatagtagggcacagaatggggagaggagagacgggaagcgcgctcctaaatagaaatgctgttctcaatcagcaccgggtccaggtagtagtaggggatgggaaggcacttgttgcgctggcggatgtcgtgtgagatctggttcaggcgctggcggaacgcctctatgctcctccgcggggcctcctccacgaagtgaatgtccgggaagtgtcccaggggccgctgcgggcagagagctcgacagctgggaccagggccggccagcaccccctcctcctgccggtggccctggcccctccaccctttggtttcagtggcctctcactccctgctcccctcttgacgccgctagttatcctcccccatccccggcttctggtcccctccctgtgctcagagtcccccatcccgtctcgcaccctgtcgtcaggctctcggctgagggtccagagcaccagcagcgtgatgcacgtggtcttcacatccggcaacgtgtccatgaaggtctccagagtggtcagccccttagtctgaatcggtggattccgcatggacgctgggaagttgggcatccaggcggtgaactccatctggaggtgggatagaggcgcgggtctgggtggaagagtacctcaggagtttccttccaccaggtgctgaccacccgccctccagtcgctgagatggactccccgcccttggcgctgaggctgggctgggttggttagactgggggtggggctgggtgtggggctggggctgagagttggggctgaggctcggtttccgttgggactggagttgaagctggaacaagttgaggctggaccagggattatggctgaggctgggtttgaggttggggcatggacgaaatttagaaggtctgagcctcgggctgggcctgggttggtgagaccaccggtacctggcctgtgttgacagcagcgtgcttggcagagcaggtgtagatgactatagtgacatatcggatcagctcaggcacggttcgcaagcacctagggaagcctgaccggcgggggaaaagcccaggcgacatcagtcgtgccctggtactggctgcccggcagagggcgccaccatgccccgctctcaccgttttgcaaaagcttcaagctgccgcatccgtaccctcatcctgcctgcgtgaccctcctatggcagcaaccccatctcccctcacccagatcataaggctggggacggaggacttggccagaagtcctccagggctgctcctggcccctgtctaaccagtggccctcagatctctcttccagtttccctggggatgccgctccggtcccagacctggggatgttgggagaggcaggaggctttcctgggttccttcggaagagtcctgccccgactcaacccagcgccccctctccactccctcccatcacctccttccagactctgtgcccactccagatggatttctcagtcccacacatcttccctaccaagctgctggcttccctttcctgttgtcccgtgtgaacctcaggttgcttctctttcctgttgtccggtgtgtcctggttgccatggtgatctcaggttccaaaagtcccacatattcaaaccagacccatcatcttcctccctaaccgctcctccttttagcccccagctcaatggatgacctacatcacgtatccagttgcaaaagtctgaaacgtggagtcgcccttggcccctccctcccctcctcctcccctcaccaccaaactcaaaccatcacccagtcctgtcatttctagctctggaattctctgtggcatccccacagctcttaccctagtcaggtccccagtcttccctcctggacaccacaacagcttccctaactgtctcctgactgccagtgcagcctgatattctagcatacaagtctgatctccttgcaaaaccctccctggatccctctggcccttaaccaggctgtgcagcctggccgtggctcacggcctcagcctcagcccattgggaacctccccacgtcccaccctaagctccagttgcagagaacatgattacagtaagcagctcctggaactccctatgctctctctggctttctcgactttccacatactgctcccatgcggaactctccgtccccatcctcagtcatctcgaggctaacctctccatcctgcagatcttagctagatgttagccaagaagttagatttcagctagatcttagcttgctgctcctgccctgtcttctctccactaccccttcccaaagtgggttaggcgccttccctgggcttccccacaacttactttagggaagtacctgccaccccagactgtgaactccttgaaggcaggcaccttcaccactgtctttttcccttttgcctcctcaataaccagcacagtgttgcactgtggatgctcactggatatttgttgagtgtgtacccaggtggcgggacctcagggcgctttcacccttctcctggagctgccagctccctggcctcctgccccttcccgttggagctcataccccatttcacagtccacaaagatttgtttctggggtggggctgggacccctccaggtctctgcagagatgacccacagcccctaatctcagacagggacccattgccagccatgttttcttccccaacctctctgagatgccactgctccaggggccagagaagagcctgtcaaaatcctagggcagcaatttggtctccttcagtctacaataaaatatgttctgatccagcccaggagggccctagcagacctgcctgggggctgcccctcagtcccagctccccctgattgcccaggtgtccaggcccatacctgagctctcccgccccaggaggcactctttaaatatttcctgcacccaagactgcaattccggatcaccctccacggctgcgtcactcgggtaataataggtgatgatctccgtcacatacctgaccaggggacagggcctcagtttggatcctcctcccctcccactcctcagccaggcttctcccacctcccccagggtgccctgacctcagttggccccagagctgccccaggcctgtgggagggcaagtcctgtggggcagaagtggagaggatggcttggcaaggtcagaacacacccagagcactcccttataagggatgggcaaggcctacaggcatctcagatcccagaagcgatttggccagcagaggtgggctggggacccaagcaaggaaggggcctgctgggctgagggtgtaggtgtgatggacacacagaccccaggccccttccccaaggccaagcccctggatgacaccagacccacactcagttctctagaagctccccacaccctctccaacatcccaggttgtccaccctaagagccacccactgctgtcctgagctcacttctccagtgcattccacaccgccaagctgtcatcgcggtagtaatatccaggcaggtcctggaccccacgctccacaaagtcattggggaggtagaggctgtcataggtgagctccgacagagcccgtaccatcaccccagcaaagccttccacgcccagggacatgccctgtgaggaaggaggcagatcctggagccggacaggcatccctggaaccccttcaggtcctctaggatcccagtaagtgcccctgtaacccctgacccagcccaccccacctccaggaacaatcctgctctgggccagcacaccagccctgcctctgctcctttctagacaggagaaccaacttcatccagctccctcccttcatgccccctcatgatgacccaaaggcaaatgggaagtcctcctcttcatctaactgaaaaggccagaggaaaacaaatgtctcgttggggttgggggcagaagtcttaccttggcagagagccccccctcattgaggagaacggcccggccaatgctgttgatctggacggtgtatcgggtatgggggatgaggagctgtggggagagcaaggaggatgaagagagagggctgaagtggcccccaaaggagctcagctccccatttctgtaacgtcagatctgctcactctgggaagtccctatgccaagccctctcttgtggtccccagatgccccccaggctgactggagtctctctgactgctcagtgggcctgggggttttcggaggccaggtgagggccatgatgcctgggggaggccccttctcccaagcccataccttgtagagggggtggcacatgggcaggttcctcagcaaggccaggcagaaggcctcagcaatgaggtgtgtctccagcaggtgggcgatggcctcgtggctgtagaactccgcatagcgtacccacgtcttggctagcagccagtcccactcagaatcactgggcaggaagatggggcaatctggcccaggggtctggctgagctaggtgtggtgaaagagaaagggttgggtgagggcagagacccacacacataaaggccccaccgcaggaaggaggcagaagggagtatgagaaggtgaaaacactcctaagctccggtcccactggtcccctgagcacccctgggcctttcctccctccccacatttgatcttgctgttccttctgctcaactgcagtaccttcctcttgcccctgtctctacctggcagctcccacttattcttcaagaaccatctcacaagctgccttctctggcaagacttccttacttcagccacacctccaccacattcaggtgcgcaggttgtgcactgcacaaggattcctagcccctcagggggcaggcagatcactgaaatcagcctacgctattccattaaggagccaggagcatcaggctctggggctctggcccatccccccagagggagcctctttctaacttgcacatgacgcttggggggacctctgggaaggaaacacccagttccttcctctgccagaccagattcccaaggcagaggctaagtctaattatctcagtatttccagtagggacctgacccccttcagggattggttttccaggtggatggatggatgaagtcaaagagacaagcacaccccacagacacatatacatgcacacactcacagatgcacacacataggggcatacaagtacagctggccctccgtatccatgggttccacaccagtggattccaccagcaacagatggaaaatattctgggagaaaaagtgtctctactgaacgtgtacagactttttttccttgtcattccctaaacaatacagtgtaacaactatctacatagcatttacattgtattgtattgggtactataagaaatccagaaaggatctattttatttcattttatttatttatttatttatttatttatttatttatttatttatttttgagaaggagtcttgctctgtcaccaggctggagtgcagtggcacgatctctgctcactgcaacctctgcctcctgggttcaagagattctcctgcctcagcctcctgaatatctgggactacaggcgccgcccccgaccatgcccagctaatttttgtagttttagtaaagatggggtttccccatgttggccaagctggtcttgagctcctgacctcaggtaatctgcccacctcggcctcccaaagtgctggggattacaggcgtgagccaccacaccgggcctagagagcgggcctagagaggattgaaaatacacaagagggccgggcgaggtggctcacgcctgtagtcccagcactttgggaggctgaggcgggagaatcgcttgagcccaggagtgcaacatggaagaaagcgtagcgctccttgtgtacacgcagcagcaagagctcacccagctccgctgagcagcgcactttgtacttctgtacctcaggggaccaagacagcaagcaggtgagaggcggggaactgccaaggcggtccttgagccttgcaaggtgcatctccacctaagcctattcgggcatacaaacctgagctgctcccagcccataccgggcttttgtatgaactagaaaaatgtgcccaggctggacgcggtggctcacgcctgtgatcccaacacacaagaagatgtgtgtaagttatatgtaaatactgggactttttttttttttttttttttgagatggagtctcgctctgtcgcccagagcgacatgcagtggcatgatctaggctcactgcaagctccgcttcctgggttcacgccattttcctgcctcagcctcccgagtagctgggactacaggcgcccgccaccacgcccggctaaatttttgtatttttagtagagacggggtttcaccgtgttagccaggatggtctcgatctcctgacctcgtgatccgcccgcctcggcctcccaaagtgctgggattacaggcgtgagccaccgcgtccggcaatactgggacattttatataagaaacttgagcatctgcagattttggcatcccggggaggtcctggaaccaatctctcaaggataacgagagacggctgaatacatgcaggtccacacgctcacataagcgcgcgcacactcggaggagcattcgcgcacacagaggctcagcggcagcgccgcctgcagcccaggcacctggatggcgatgggcatcatcttgccctcgggtccaaagtgcagcaggcagaggggggcgcagtggtgctgcttccggccgctgagctccacggtggggatgccctccatgatgcggtagtcggccaggtaaatgttccccttctggaggggagccgcgatgggtggcaagtaggcacccacacgggaagcccgtgacccgcgccgcaggtgcacagggcgctggcgactaggggcaggggtgggacggggacagggacgcggggtgcgggcttgcctgggactggcgcgggcgccggaggtggggagagacggggatgcccgcgagggaggccgggaggagggccggggtctccgccggagcgggcctcacctccagctccgcttgcaagcacgttccctcgcccaggaacggagccaccatgtcgtctgtgacggggaacttgtctgggatccgcgtgcagcggcggatcaggccggggttgacgccgttgaggtactggtacccaaagaaggtgtcctctgcccagtgctcggccacgtactctgcgaggacggcgcgagggcgtcacaaggaggcccggcccccctcggggacggagaggcatgggacagaagaagactatgggcaccgagaggagtcggggaggaaaacgaggcccccagcctggcgctgagcggccggaggagcccggtgcgacattttccaagaagccgccagagggcgcgcgcgcgcctcgctgcctctcccgtcccactgccccgaagtcgggggcctgcctagcacgccggagaccgcctggctccccctgctcgatccgggacgccccattccataccggagacgacagatttcttgccagggaaaattttcctaatgtccttcagcctcttccacgaatgtttgcagtccaacaggccgcggactttgaaagccagtgccctaggagatgggattccaggaagaggccttcagaggggctgccaagcgccggctggggcaggtggcggggccgccccatccacttaggtctctgggtctcagggtctgtgcgtcgcaaagtctctgggtcccatgtctcaagatctttgcatctctaggtctctgggatcatgtctcaggttttctgggtctgcgtttcagctccctctgccttcctggccattccaacctctggggctgtcttggaggccgccaaggttgggggagagggaaagttcttgcaggagccctcgttctcccgtcactcacacggactcacatgggccccaggcggacgaagaaggaggccgtcttgaggaaggagtagcggagatttaagttcaggaacttggtggccttaaagttgatgagaattgggaatcccggaatatagccattccacctgtggggagaagcgcagggcaactgggatccagggggcggggaggaggcaggcgcccaggggaaaaccatgggcggggcccagcacagcttcgggtccttactcaggccggttggggttgcgatgcctccgcaccggagggcggtaactgggaatgtgcacatagctgggcaggccaggaagaaagactcgccagctgcaagggaaaccgagatgtcaccctcatgcccgtgcaccaccccagggcaaagggccagagccatcactgccccccacctccctggacccctgccgggcgcccagactctgccacccgccccctcactggtagaagtcctgcttggctctgatctcctcttttctgtgctccaggaggacggggagcgagtcatctgctgttgtctttcctgtagggagaccaaggagaggactcaagggctgacccttgcccctgcccacttcaggaagcaggagttcagcttctgtgccccaggtcgtctctgggggggcccatgaccaaggagtgggaaggctcaccttgggagagtgaaggtgcgtcctgtccggaaatatcagataaaagaatcacggacccaccctctttcctcttgctctactgtcaagctaagctctgctgctgcaaaaagtccctcctctagacccactgaaatattttttatttctataaattcatggagtacaagagcaatgttgttacatgcatagtggccaagttagggctttaggttacccatcacccaaataaagtatattgtacccattaagtaatttctcatcatccaccccctcccatcctctcacccttgagagtctccattgtctattgttttgctatgtccatgtgtacacattttttttttaatggagtctcgttcttgtcacccagcctggaatgcaatggcatgatctcggctcactgcaacctctgcctcctgggttcaagcgattctgctgcctcagtgtccggagtaggtgggattacaggtgcctgccaccatgcccggctactttttgtatttttagtagacacgtggtttcgccatgttgtccagggtggtctcgaactcctgacctcaggtcatctgcacgcctctgcctcccaaagtgctgggattataggtgtgagccaccacacctggcccatgtgtacacattttttaacacccatttatgggtgagaacattcggtatttgactttctggtctggcttgtttcacttaagataatgacttctagttccatccatgttgctgcaaatgacatgatttcatttttttcatgactgaatagtattccactgtgtatatataccacattttctttatccagtcatccattagggcacttagggtgattccatatctttgctagtgtgaatagcgccacaataaataaggcatctttttgatatgttgatttcttttcctttgggtatataccactgaaatattaataactgacagttgtttagcacttactaggtcccaggtattgggaaaagggcttgtggggtgcctgtataaactggccataaaaatatgtgacagtaagctgtggaaagtcacaaaaggcctctgaggaggaaagcgttcttatcgccattatgttcccatgctctgagcgttaacctgctgtcttatctataaacactgtgttcaaggagaaagacactcctttgaaacctggaaggtggacagacgcgcaggctcctagttaagcctgttcccactagctgctctccgataagttaaagatgtgctgtttgagcacaaaggagattcgtttaaaccgctattgctatagattacgcctgtgacgcactgcctccctttcagtgtttcaccctgaacatctgcttcttagatctaagtgactgtactcaataaatagtgtggagaccagaactctgggccttttgcagcctccattttgcaactgcctccctggcccccactctttttgcactcttaacctgtctcttctcattccttcgtcaccaccggactttgggtaccctacaggtggtgttgaggctggtccccaacaccaggcactttgtagacactttacttttattaatctaagcctaagaagcaccctatgaggcaggtgactattactataggctggtgaccccttcgtcacaactgcaaagtacagaaagctgtggaaatcaagtttgtctgtttgttccacaacaaattcattggttgacaaagcctgctgtgaatctccctgaggctatatacaatctttatttaactcactgggtctaactattcatagtttttactgggaagtgttagtatatttgattggggtgccctgtggtagatatagcacataatatatggggtatgtgtgtgatatagatttatagatgaagatatatatgtatacatatacatattttatataaacatacacacatgtgtacagatacatgtgtatgtagcttctcaataaaatccgaatttcaaagcacccctggaatcaacagtttcagctaaaggactgtatccccatgcccattttacaaggagaaacagtcgctattatgtattacgtggggacaaggctggatttgccccgtagtgggctgcttctgaccaccaacagttgttaagccttttaaaattctgttcaggccaggtgcggtggttcacgcctgtaatcccagcactttgggcggccaaggcaggtggatcatgaggtcaggaattcaagaccagcctgaccaacatgatgaaaccccatctccactaaaaatacaaaaattagctgggtgtggtgttgcatgcctgtaatcccagctactctggaggctgaagcaggaaaatcacttgaacccaggaagcagaggttacaatgagctgagatcatgccactgcactccagcctgggtgacgaagcgagactctgtctcaaaagaaaaaacaaaaacaaaacaaaaaaaaacaactccgttcagatgtcatcttattggattctcacatccaccctatgaagtaggttctgttgttatctccattttacagatgagggaaccaaggcttagaagaatttggaaatgtggccgggtgcggtggctcacacctgtaatcccagcactttgggaggccaaggcaggcagatcacaaggtcaggagatcgaaaccatcctggctaacacggtgaaaccccatctgtactaaaaatacaaaaaattagccgggcgtggtggcactcgcctgtagtcccagctactcaggaggctgaggcaggagaatcacttgaacctggaaggtggaggttgcagtgagccgagattgcgccactgcactccagggcgacagagcgagactccatctcaaaaaaaaaaatttgaaaatatgcccaaatgtccagctagtcagtggaagaactgagacctaagtccaggtccgtctttctccagcaccctggctggtggtccccaggctggcctgtgcctaccgctgcagcccatcatttcccctcaagtcccttacctcaccaccctctccctcctccacctgcctcagctcatgttgtattctggatgaacagtgctccctggagttgtgcaacccagagacctagctcgttttcatccccagggcggaagactcactcctttgagggccctatgggtgactcaagtctccctgtcctgttgcgtggcagcggccccacccaaccccattcctgcctggccaccagcatcaccctgcctgtcccctgcttccatgtcacccagacctgtcactgcaggaagatgctctgtgtccccagtgagaccctccccttggcatgctcaccatctcccaggctttcctcgcctctcctttccccagctcaggccctgttccccaatcctgggggaagattccagcacagggcaatgagaaacggaagagaggtagtcagctgcagggaggatggggcttcgggccctgggtgtcctcagctcagcctttccctcccattcgcctcaagggaagccaacagacactcaggtggtggaactgggagataagagaggacaggcccccagtcctcatgcagcaccacaaattaggaagctgaccccagcccaccacacaaggggctctggcaggggtgggtgcaaggagctcagccactccggtcctatgtctctcccatgggagtaaccaagcaagtggaaaacccactgggcagccttggccagccttaaccttggagaaaccctgacagtctatctgaataacagggcccctattagatagatccttactggattaaggggggccttttggagtaacagtgcatcctgttagagaaatatggtgtcctgttgggaaaatagggagtcctttggagcaatagaacatcccatcagtctaaaaaatgctcaattagaaaactggggctcatgcctgtaatgccagcactttgggaggctgaggcaggcagatcacctgagttcaggagtttgagaccagcctggccaacaaagtgaaaccccatctctactaaaaatgcaaaaactagcatcaggaggctgaggcaggagaatcgcttgaacctgggaggtggaggttgcagtgagccgagatcgtgccattgcactccagcctgggcaacaagagtgaaactccgtctcaaaaaaagaaagccagggcgtcataattataagaccgcagcaccacggagacctgttgaactcaaagggcttctaaatgggatagcaaggtgctggttggaataatggggcatcctgttatagtaacagaatcctgctggagtaacagggcgtctttctggagcgcatatgattggcatcataaataggcctcctgtgagagtcctgagcctgtacttagcatcacaaggggtatttttaacgtggccgggcatcttataggagtcagggaggactggagaggtagcggggagcgcactctgggaatgctgtctgctgccagatggggatgctgagggtagctgctgggcctcaggcacctctcttcctccaatgtgcagccccaagctgagctcagggcagcagcactgactgagggaaatgtgtgacagtggcaggagagcccaggagtccctggtggggctgggcccccctctggcttgatgggagcctgggtgccatgccagggtagcaggctggagctagaggcctcacggccataggatggagcagggtgatgagggcttacctgtggcctcccggagtgccagggtctcgtagccatccatccactggtaggcggggaagtggtagatacggccgttgggggcacagatctgcacatagttgcagtaccaagggtccttggggaagaaggcgtaccgctctttgtgcaggcggatgatgatgagctcacccaggtcctgagggcactgcacggtgtactggcccacctaggcaggatgcaagcctggctgagtgggcaggacttcaccccggctcccaggccgcccacccctctggcccctcacctaggccctgctcatgctgcgcaatgctcacctccctggactgacggagggacaggatattgacctgatcattgagcttccttctgacttctccagcttgggggtctcctactggattcctctacccagggctatgtaggactccagcccctccttctctccatccccagctcctgtcttctcccactcccctctccaggcacctgaggttgcaggaacccttcagacccctggggacttgggtaccactctacagttttcgagtggggagaggcccagccagccccttctcccattcatcaatgaagatgcagatattcagaatggccacatagatagagtgacctattaaggtcgcctagcagcaggtggctgggtctgactgaaaatcaggtctgaggacccgcaaagcgtgccttccactggacaggctggtctgatgccattttaagtcacagagaatccagtgcaaatgtgagacagttaggaggcagctgaattaggaagagtgactgagaatggaagagagagggatgcgggagagggggtaagacagaaaggggaggagagcaaaggggaaggaaagcaggtggaaaggattgagaaaagagagatgcaggataggcagagacagggagagagggctgaggaagagggagagagaagaaaaggatggggagggagatgaggaatgcctgaaagggttagagatgaaggagcaggatggagaaggatggcccagagatctgggacatgggcgaggggctggaagccagctctggacaaggcgtgtagagccactggggagcccactgccttcggagctgtgcctcagctctccagcctctcctcgccaagctcagctcacctggctccccctgcgcaccttcacccctcccggggccacaaagacacacagacacacacagacacacacagacacacacacacacacacacagacacacacacacacacacacacacacacactcttaccgccccagttgcaaagtctctcccaaagtggttcagcagctgcttatggctctctccttgtgtccccacaatggtcagtgagatggagtcccgtgttcccgacaagaggtcggtgcctgtggccaccctgactttgtaggtggccatggctgctcttcaggaggcaagaggggcactcagtcccagacaccgtggaggggccacacgaaggcccaaggcaggcaagagaagccaggcacagagtggagtggacagggctggcctccgaggtgcagtggtgaggtggcgaggtggggtgactaggcctgccagccaaattctggaaaagctgctgcccttggtggccggggtgggtgccgggcaggcccaggcggagcccagctggtggtgagtgagcaggtgtctgggctccaagccttctgggagctggtggggaggaagagcaggcagggcactgggcctgcctctgaaagggcggatagaagatgccgtggatgaaggcgccttcagggtgggggagccagtccagcctgagccagggccctagggaagttgcgggagggggcagggtgtggtccccagatctttatcagactaataagctccttcctcctgccagtccccattggctacagtgccaggcacccctactaagcagggccatgggcagtgagtgacttgcattggttctgaggccactggtgggcgggggaggggagggggaggggcactaagtggcagcgcagctggccagcctccaggccattcctctctgggaaatgggacaggtagtggccacagtgagaaagctggcctgtccttctgccccagggcccagagtctgtgactggaagggtgggaggtgttgaagctagggctcggggaccacatgggtgcccaaaggcctgaagatgctgcggggaggaacgatcagggtaggagaaggggatctgttgcttcctgtggggccaggatccactggtgagggattggagttggatataaaatcagaagcccaaaaaaaaaaaaaaaaaaactaaattagaagacagagtgaaatctggggcataagaattaagttaaatagctgggcgtggtggctcacgcctgtaatcccagcactttagaaagccaaggcaggtgggtcacctgagctcaagagttcgagaccagcctggccaacatggtgaaaccttgtctctactaaaaatacaaaaattagccaggcgtggtggcatgcgcctgtagtcccagctacttgggaggctgaggcaggagaatcgcttgaactcaggaggcggaagttgcagtgagttgagatcgtgccaccgcactccagcctgggcaacagagcaagactccgtctccaaaaaaaaaagacaaaagaattaagttaaataatggattaatatgatcaatattttgtggtataatcataaaatagaattctacccaggaataaaaagaatgaactgcaatgcggatgagtctcacaaagatgatactgagcaaaaagagccagacattaaaggggatacgttctgttatccattgataggaacttccagaaccagcaaaactgagcaattctcagacaacctctactggtgagtatccctggcagagggaggccatataggctgctggaggtgttcttatcttgatctgaggggcgtctagggtacttcattcatttcattatgtgttatcctttaatttcataaagtacataccctcacttccctcccaaaaaagaatgaagctaggaagagggctggaggcagggctgagctccagtggaactgtgtttgttgggaaccaggtcgttcctccctcagatatgtagtgagcacggtgcacggcgttctaggcactgcagaggcagagaagaaatgaaacatacatggagcttacggaatagctgggaaagaagtgaaagaaacagtaaacaagaatttgttcactataattttggatactaagtgctctgaagaaaataagcgtgggaggttgggattgggaactagttgctgatagaatcacagaagtcagagccgcaggatagggagaaggtgttaggagtaaggtgaagagcattatgagagagtcagagatagactctccaaagataggatttgggacccagggagagtgaggaggcaggcacgttcctattccctttttctggacctgtcctctttcctttcacctccgaggagcagcttctgtcaaccaggaagcatagccctgctttcctccctgatggcacgcttccatcaccatcgaaggaaggtcattcaatgcccaggccaagttagggtcagagggggctgggattgtgagatgaagagaaggttccagtaggttccagactggatgtggaatggggtcgaaactgcaattcaggtttaggttagagacacagatgtggctggagttggggattgaaatgatcttttccagacccaaatctgttcacatcactctctatgttccctcctcccaaccctgatcaagcctggcagtggctcctctttacctttgggacagtgacaccatcccctcccgtggcccccacggcctgcctgattggcttcacccctcacattcccctttgctctcttctgtctgggaccacgtgcctttcattcattcatcaacagacactggccgaacccctactgtgtgttcagcgctgtgtcaggtcctgaaaatacaatgcgatcaaagcaaacccctgcacccatggagcttgccttcaagtgagggaagcagacaatattacctagtaaccaaatacattaaatagtatgttaaatagtgataagtgctgaagagaaaagagagaacagggaaggataatataaaaaatagaggagtgccgggcatggtggctcatgcctgtaatcccagcactttgggaggctgaggtgggcggatcacctgaggtcaggagttcgggaccagcctgaccaacatggagtaaccccgtctctactaaaaataaaaattagccgggcatggtggcgcatgcctgtaatcccagctactcgggggctgaggcaggagaatagcttgaacccaggaagcagaggttgcagtgagccaaggtcatgccattgctatcaagcctgggcaacaaaagcgaaaatccatctcagaaaaaagaaaaggaggatattttagatacagagtggccaaggagggctccttgggaagaagacttttgagtaaagacctgaaggaagtgaagtcagctcgtcaccatcccagggccttggcacatgctgttccctctctacctctcaaactgaggtcacgtttcctcttcctcctgatcttagctcaataattgctttttccaggaaagccaaatttcactatacatggctctcacagcactatagctaacatctttgattgatgtctgttttctctaataaattagtccatacttttttttggttttgtccccatctcctggtgtcatacttggtacctgggagacaccgaaaacatagttgaatgggttaatgacaaggacaaggtcagggctggggattgaatcgatgatggctttggagttatggtgaagatccgaagagagctgacttgggctcagggtgagagaaggggcaaggcgtggtgtaggggagggaaaggggttgggtggggagggagggaggagaggggagaaggctgaggatgagggttgtgcccagctctgggtggcagggctggctgtcctgggctgcagacagaagccgtccagctggatctcccccctgggatctccctcctcaaccacctcgatgactcttggaggatgctgggagcctgaagatgcaaatcttaagatgcaaattccatgcaaattctcccagcttcctctttctaatctctcccctttgccctgtgtccccagggggctgctgaggcttggtgagaagcagggcagtggactgggcaaactgagtcatatcctgctaccaataggtctcctccaacccaaatcccagggtggccctgggtttgctcagggctccagtgtggagtgggaattaggttcctgagggagacggagatggaggcagggatgctgaggatgtcaatgtggctggggcagggacagggacgggatcaggcatgaggatgtagatggggcactccccagctatgaccaaaacgtagacgcgtgactcttgataggtgctcattgggctgaagaactggttctcctggaccaggggcgggagccagtgaggaggagaggtttctgggaaggattcacactcactggggttgctaactaggggccatccacacaggaagctgagttctcactgctggggtatcccccgtgcctgaccccaccccaagccctgcaaggcaaggagcaactaactcctggggacccactctcctaagacacagagaaagaaaaatcaaatcacgccactcccctgcttaaagttcaccagagcttaaaatggggttgtccgtagaaatgaatccaagggccaggcgcggtggctcatgcccataatcccagcactttgggaggccaacacaggcggatcatgaggtcgggagttcaagaccagcctgaccaacatggtaaaaccccgtctctactaaaaatacaaaaattagccgggcgttgtggcacgcgcctgtaatcccagctattcaggaggctgagacgggagaatcgcttgaacaggggaggtggagattgcagtaagccaagatagcgccactgcactccagcctgggcaatagagagagactccgtctcaaaaaaaaaaaaaaagaaagaaagaaagaaagaaaagagacgaatccaaggacttatcatgtctacaagaccatgccttcccgacacctttttccagccactctggccttcttgctgtacccagaacatgtgtccttcaggacccttgcatttgccattcctgggtttgtaatacccttcccccaagctgttcaagctgtttcaaccaagctgttcaagctgtttcaagagtggttttgtttgtttgtttgtttgtttgtttgttttgagacggtgtctcactctgtcacctaggctggagtgcagtggtgcaatctcagctcactgcaacctccacctctcaggctcaagcgatcctcccaccttggtctcccgagtagctgggaccacaggcgtagtccacctggctaattttttgtatcttttggtagagatgggattttgccacgtggccgggactggtctcaaactcctgagctcaagcgatttgcctgtctcagcctcccaaagtgctgggattacaggagtgagccaccgcacccgaccctaagcgtgtgttgttcatgtcatccaggtctcaactctagtgtcacctcctcagagtccctccctgaccaccgtccctcatgtttccccgccctccgccctccatcatgctaccctgccacctggttgtatctccaactgcacttgccaccgcccaaaaggatctttatctgtttattgatgcgtttattgtctgtctctccagcacccataagaagggtgaaagaaggggttgtgcctggggagctcacagctgctctcccaaaatctagaacagcatctaggcagacaagagccacgaagcaaagcgatgctaggatgtcaacgctggaaagggcttttcaggtcttctcgtcccactcatgtatctgacaggttgggaccactgaggccgagggacttgctcaagatcagctggggaaggaggctggtgtgcttcccattataccagttgaccttttagactgaccaaaaaacagtggagggcagagtgtaagctgaggggagctcctgacctcacagggctccagaaacttgatgtgagcctcctccccatgtcctgtccccagagtcagggcaggacatcctaagtgtaccaggtgtgtctgcccaataaatctctttccaagctgcctttctggaaaaccagattccaatgacccgccctggtccctccctctccggctcaggggcatttttcaggataggcatgcctactaatgctgcctttgtggaggcccaaggagtgttcatcctcttgggggacagggtgcctgagcatgcccatgcccttttcactgctgcttccaaccccagggtcaaaggggcctgcactgcgcacccaacaataatactggcagctgtcacttactgaggagctatcacgtctctgtcattgaatcagatcctttgcatacaccattttaaaatatgaaacaggccaggcgcggtggctcacgcctataatcccagcactttgggaggccgaggtgggtggatcgcctgaggttgggagtttgagaccagcctgaccaacatggagaaaccccgtctctactaaaaatacaaaattagccggggtggtgtggtggtgcatgcctgtaatcccagctactcgggaggctgaggcaggagaatcacttgaacccgggaggcggaggttgcggtgagccgagatcgtgccattgtactccagtctgggcaacaagagcgaaaatccgtctcaaagaataataaataaataaataaataaataaataaataaataaataaataaataaaacaaatacatagctctatttaaaatgcttggcagccaggcgcaaggtcaaaggggcctgcactgcgcacctagcctcagcctcaccctcacccctggtggccacaagggggcgcccctgagtatttcttagtcctttgatttgttctacagtgaacaaaactggtgatttgggataagtccttaggttgcaatctgcatgtgagatatctgcaaacacacctctttagcacagtggtatgaggatcctcttctccaaggatcacagatgcagaaagtgaaaattcaacagccaaagacagccttccccaacacacacacagacacacacacacacacacacgcgcgcgcgcgagcaaagggagaagtggtttggttgacaacagagaagattcttgggctgggatgtaatgggacagttggccgccccagaatttcaatatgccagggctttgggatggcaatttagttagggaggaaatgtggttaggcgtggagctcttcgtggagctgcggttgtactgaaaacacatgttgttttcttttcttttcttttcttttctttgagatggagtctctgtcaccaggctggagtgcagtggcacgatctcggctcactgcaatcttcgcttcccaggttcaagcaattctcctgcctcagcgtccggagtagctggaactacaggcgcacaccaccacacccagctaatttttgtatttttagtagagacagggtttcaccatgttggccaggatggtctcgctctcttgacctcatgatccacccgcctcagcctcccaaagtgctgggattacaggcgtgagccaccgcgcctggctgtatatttcttagatgatttaagatatttcttagattcttagatgatttctttgttttcttagacaatggcagccccagccaaggcagcctgtggatccccactaactccaggaacgaacactgaccatggtctgcactggggctgagacacactgcagcccgcaaagcccccagccacgtgaagctctgggtgggtcgcctattacgttgacactaaaaccatctgatccccctaccacgggcaccacagggatgggggagcagttaccctgtcattgtccaaagacactgtgatcccgccagagagaggccatgaccagggttgggtcaggcacagaatttgactcaggtggcagaggaaggaaggaaggtgggctggatctgaggtctggggaagcagaaaaccagggtgttgggcggctgtggattaagaagaccggggagactgacttgaggctgcacagatctctatgtttaagggctgtggggctggaagggagaaaatcagactccccatattaccagccatgtggccaggatcaactagactataccacagtaacaacccccaaattccagtggcttcacctgacaagtttatttctcactcagtccatgtctggctcagtcagcgggggcctcttctacagtcccttggacacacaagcaagtgccatctcaacatgtgcttccggaagggagaggcagagagaaggaaatcaggggtctccgtgtggcctggagacgatcctcatcccttctgctcccaactcaaccaaaactcatcctgtgactgtacccatccacaagagggccagaggctgagccttccatgtgtccaggaggagaactggatttcggtggcaacgttaacaattacccagactctgaggcttcacaaaatactcactattccacttctcagtcccctgaatccagacattccctcacctcctgatgatgcactctggaaggtgagggcaggaatatatggcttggctggatagtgcgttgagccgggacacttctgtctccagaatagatgatccacggatccactgctgcccctcactgcaatcccctggcacccccaacctcacccacccatacacacacacacatcaaagcagcaaaacaaaatgagagccaaatattttggtttttattgaactcactgggctcaaggacagaaagaaaaaaatgggatgaaagggagtgggatgaaaggggagttggatgaaatctttggagaaagacagatctccacaaacaccccaggcctgggaacctgttcctgagaacagccgttaggggtccaggcaagctgccctccaattcttcccctccccttaaaggtgctagggacaaaggggaccacatgttagacccaggcacacagtccttctgtgcccagtttccaggcttttccagagaaggaagctgggctggtggctctaggcttggaagaaagagaacgtagaaaggcatggtaggagaaggagtttggggattggggaggatgagggagaaaagctcagaaacccaagctgggcattccaagaggctggaacaagaggctgccccaagtggggcaagaagtgaagcggttccttcctttcggaggggctattgtgcattggactttggtcagcggcttttaacctggacgctgctgtgctggtctctcacagctcagggcccagtttgtatgatgtcagagccatcttggctgcaaaagtctccatgtgcagaagagaaggttcaggtgaactgagaacagggaggatggaagggtctggaggacctgaggaactggtcctcctcatgcttggacctttctttcttcttgggtggtatttgggggtggttagatggagacgctgttctcaatgaggggagggtccaggtaggtgtagggcagtgccagaccctggttccgctcctggatgtcccttgagatctgggccaggcggctctggaaggcggcgatgctccgcctcggggcctcctctgtgaagtgctcatctgggtaggtgcccaggggcctctgggaggacatcaggtaagaggtcaggatgacattcagatgggatggggaataacggaggaccacatgtaacagcaaatccagtcaaggtggcttctagtagcacaacccagttgcagccattgtaaacacttgccccaaactgccaccccatgatcctgacacgaggccccccagcacccaaaccccaaacagagtaggggacagactgtgacgtaggagccagccaacccaaattcagtactgcctctgctggcaagcctctgcctgttactttgactctttgagactcaattcctgcatctgaaaatggatgggttgaactagaaaaaaaaatttttgaggcaaggtctcactctgttgcccaggctggagtacagtggtgtgatcatagcccactgcagcctcaaactcctgggctcaagtgatcctcccaccttggcctcccaaagcactagaattacaggtgtgagccaccgtgcctggcctagacctttaaaggtccctttcatacctgatccaactgctctgtgaactaaaagaacgaaccacacctttcatacaaccgagatcaaagtaaacactgcccaggaaatatacccaagaatataacaattacttcataatttcacaaaattcaactcctaaaaacaaccagcatcctggttctaaggtaccttcacaatcaaccatcgtgatggaacttttgccaacacaatcaccatcatcctccactgccacactttacagcacagccaatcactatcgagaaatatcacaatgagctccagtcactgccatcctgtgtacaggactgtccctccctcatgatcatatcacacaaccagctcatcacgacaacgcagaggtccagcctcctaaccagcacacacttcccatttactagaaccttcatataattgttgccaatactactgatcttttttttttttttttttgagacagagtctcgcactgtcgcccaggttggagtgcagtggcgcgatctcggctcactgcaagctctacctcccgggttcacgctattctcctgcctcagcctcccgagtagctgggactacaggtgcctgccaccatgcctggctaattttttgtatttttagtagagacagggtttcaccgtattagccaggatggtctcgatctcctgacctcgtgatctgcccgcctcggcctcccaaagtgctgggattacagatgtgagccaccacgcccagccaatactactgatctttaacaaattctttttctcgttttgttgcattggcgaagccctccagatcaatgttaaatagcagcagtaatagtgggcattgggcattattttcttatctctgactttaatgaatagacatctatggtctcaccataaatacagtgttttttgaaatatacttttggtttttgttttttttttttttttttttttgagacggagtctcgctctgtcacccaggctggagtgcagtggcgcgatcttggctcgctgcaacctccgtctcccgggatcaagtgatttctcctgcctcagcctcccgagtagctgggattacaggtagccaccaccatgcctggctaattttcttatttttaggagagatgaggtttcaccatgttggccaggctggtcttgaactccaaacctcaggtgatccacctgcctcagcctcccaaagtgctgagattacaggcgtgagccactacacccagcctgaaatatacttctaatcaaaactccttaagggggtttcattttacactgagtttttattagtaatggctgctcacatttatcaaatgctttttcagcacatattgagataattatatggtatgcatctttattgacgtaatgaactatattgctagatttcataaggttgaaccaacctttcattcctttcattcctagaataaattagactttatcatggtgtgttattgttttattattcactattggccttcattggctgatatatttttaagattgttgtagctaagtggaataagtatatatatatttttttctttttttgtttaaacagggtctcactctgtcacccaggcagaagtgtagcgatgggatcacagcttaccacagccttgaactcccaaatttaagcaatcttcccacctcagccacccgagtagctgggatcacagccatacgccatcatgcccggctagttttctttttttttttttttttggagagacaaggtctcactatattactcaggctggtcttaaatcctgggcccaagcggtcctcttgcctctgcttcccaaagtgctgggattacaggcatgagccactgcacccggccttataatttcattttcgtaataacagctaacacgtaagcactgtacatgaaccatcgcaaccatacatcaactctgaagacaggtattcttattattctcactttaaagataaggaaataaggcttagagaggccattacataactaaagtcatatgggtggtaggtgtggatctgggactagagccttccaatgagacccactgcccttcttagtactaccagccgggcgcggaggctcacgcctgtaatcccagcactttggaagcctgagatgggtggatcacctgaggtcaggagttcgagaccagcctgactaacatggagaaaccccatctctactaaaagtacaaaattagccaggtgtgatggtgcatgcctgtaatcccagctactcaggaggctgaggcaggaaaattgcttgaacccgggaggcagaggttgcactgagccgagaccgcgccactgcactctagcctgggtgacggagtgagactctgtctcaaaaaaaaaaaaaaagtaaaaaatcttctctgcatttgtggttatacgcctttcccattcctaatgctgtgtatttatgttccctttctttctcttttttattttcctccttgattagaattgtctaggccagatgcagtggctcacacctataatcccagcacattgggaggctaaggcaggaggatcactttagcccaggagttcaagaccagcctgggcaatataacaagaccctgtctctaccaaaaatcaaaaaattagccaggcgtggtgatgcctgtggcctcagctacaggagaggctggggtgagagaatttcttgagcccaggagtttgaggatgcagtgagccatgatcatgtcactgcactccagcctgggtgaccctgtctggagttgaccaggctttttttcagacaacctgaccctgtcaaaagagagaaagagagagaaagaaagagagggagggagggagaggggggagggagggacggaagcaaaaaaaatagtgctgtaagtgacagtctgccacttctgggcctagacttgaagaaatctgaaagcttgtttgcaatcttggaagccagccaccgtgctatgaggaagtccagctatcctgctggggagagaccccttggagagtcctgggggataagacagcatatggagagagagaaaaaccacacaggtgcactgaggccccagacatgtgagcaaagccttctgggaacttccagcacagcccagtcaccagctgattgcatgcaagtgtttcaccctagccagtaccctctggactgcccagcctagccctgcccaaatttctgatccagagaatcttaagaaaaaagaaatatgtctgtagtttttttattttattgtattgtggttttttttgaaataacaagttttatgtttttaaaatcagattgacatctaatttctttttttcttttctttcttaaagatggggtcttgttatgtggcccaggctgaagtgcagtggctattcacaggcatggtcatgcacactgcagccttgaactcctagcctctaggaatcctctctctgcggcctcctgagtagctgggactacaggcctgtgccattgcacctggcttaatacttgatttctaaaactgtagtatagccatcaaaaaaacagaacacacacacacaccagagaaagaaagagaaaacacagcagaagacagaaatatgacactggattcaaagcctacttactagctctgtgctgttgaacaaattgctgaatctccctgaacctcagttttctcccctgtgaagtggaactaccatttattgaacatttatatgccagcacggtgccaagctgctttttttttgtttttttttttttgagatggaacttcactcttgttgcccaggctggagttcagtggtaccatctcagctcactgcaacctctgcctcccgggtttaagtgattctcttacctcagccttctgagtagctgggttacaggcatgcatcatcatgcccacctaatttttgtatttttagtagagatgggggtttcaccatgttggccaggctgatctcgaactcctgacctcaggtgatccacccacctcggcctcccaatgtgctgggattacaggcgtgagccaccacgcctggctgccaagcattttaaatagagctatgtatttggttcacattttaaaatcatgtacacaaaggatctgatttaataactgagacatgatggctcctcagtgacagctgccattattattgttgttataaatttccaagttaaactttctatagtttataggagagagccctccaccctcatgctgttgtctacttatctgtcatccctctgggaccagatagggacaggacccagagtcctgccattcccaggatataaggtagcaagttaaaacttgccaggaagatcaaatatgtgggatctttctttttttgttgtttttttgttttttgttttttgtttttgtgtcacccaggctggcgtgcagtggcgtgaacatggctcactgcatttttttacttcctgggctcaagtgatcctcccactttagctccccccaagcagctgggaccacaggcacacactaatacgcccgattaatttttgtgttttgggtagagacagggtttcaccatgtttcctaggctgctcttgaattcctaggctcaagcaatccaccggcctcagcctcccaaagtgctgggattgcaggcacgagccactgtgcccagcaacatctggaatctttccagcaccaaagggagtcaagcgtgagaaataagaatattcacctgttagagagcttgtgtgcaagacggctgggtggaaacaaagatgatgggaaccagtgataaagggctacttgcctggcctaaactcagatattggcccctctctagcctcctgcctccaaagttgccctttgcatccattcacgcagccacaggagcaccctagctaaagcagatttaaccattgggcctcaggcttaaaagtcttgattggcggccgtgcgcggtggctcacacctgtaattccagcactttgggaggccaagatgggtggatcacaaggtcaggaattcgagaccagcctggccaacatggtgaaaccccatctctactaaaaatacaaaaattagctgggcacagtggtgggtgcctgtaatcccagctactcgggaggctgaggcaggagaatcgcttaaacctgggaggcggaggttgcagtgagctgatatcgcaccattgcactccagcctgggtgacagagcaagactccatgtgggggggtgggggaagccttgattggctaccctttgtcttctaaacgaacactgtgcagacaaagccctaccttcctctccgctctgctatttccatttgtgatcctacaaacacaccagtgatttctcgccttcgctccttggtcctgttcttccccctccctaaaaaagagccctgctcttcctctctgtccaactcctacttgtcctgcagatttcaacttagatgtcactttctccaagaagccttcctgggttcccccagacccatttaggttcctcagggccctgtccttacccctatcactggactgtaagctcacatggacaagtttcatagctgcccataacagtgtctgggtcaccactggtactcaggaagtgtgtgttgaatggagaaattaacatataagtaactcctacaacacggtggtgccctttttcattgacctgtatgtctcctcaactagaccacaggcttcttgaaggcaggaaggtctcagccagcgttataggcctggtgcccagtgctgtgtggacacataggaagtatccaacaaatgtttattgaatgtttgcattaacacatgagtagttgatgaatgaacattcggataaatggatggacggacagattggtaactaaactggtatttgcttcagtctatgtcttttgggattatcattttctgaagaaattgaagaacccaaggcagttctgcagtgaacataaatcccgtcgatcagtcctcaagcccccagacgaagccaccaccacccctactggtggccctaaagaaccctactcccctcaacatcccgtatacacacctggtccttgggttcttggctaaccaaccagaagaggaggaggttgttacagctgatgttcacttcagggagggtgtctaggtaagtcttcagggtggtggtccccttggtctggggtgggggctgcctcatggatgatggagcattgggcatccaggccccaaagtcatgctgtggagacccccatcccagttgggtcagttggccagaaggggagtatcacctccctcttcaccatccctgattccacctctgccgtcctagaggtgatagttgggaaatgaggggatcacggaaaggcaagagagctgggaaatgaggggatcatggaaaggcaagagaggaaagggtagggagtggaaagtcccagaagtggggcaggaagccagcttactccttgtcactccccgcccagtgttccaggactcggtggggtgagtcactagggaaggaggtggccccagagtggaggtaatcctagaaaagggccttgggttgccatgccacacagagcaagctgctactccacctggctgggttctaaccatgagaggagcccctaagttcttctcccaaattaacatcaacttgaatcaccattacaaccttggacccagctccacccagtcatcacccaatgccaacccttcaccccactcagctgccactccaaccccaagtctaatcataaacccaccccaacgctgacccacccaagctctcaacccaaattcaggcctcaagtccattgctgagacctgatgtccccaggcctgccctttgtagcctcacctgcccactgttgacagcagcgtgctgggcagagcaattgaagatgattgcagtgaggaacttcaccatctctcctggggtgcacagccggcttgggaaacctgggtgtggggaggaagggtagagggtgtggatggaaggtactggattcctagggccagctcaggactggggctcaccacagggggaaagtgaggaagtagggaacaccgagccatgactgtcttgtcgggctggttagggatggccaccaccaagatttgtggtctctgaagtgggtcaggataggagatgggggctgggatctggccagaaaatccccggcaggcagggccaatgacagaggcagcttcaagcccaagtgcccagctgcctctccctgacttccaaggcacttcaatctgcagcccctattaggatgtaatgatttaatcctacccggttcaccaagatttgttcaagcacccagtatccaaccatcctctgctgggcttagcagcagagacccacgcagagggcgtgttactgaaaagctcacagtaacagaagcagaaggaagcttctaagaccagagcttggctctttgaggagagggcaagcagggcagaaaggggcaccaggagcagagtggttagtggaggcctcctggaggacaagaggggccttgtgagttgaaagatggatgagcctccaatggaaaaaagacaacagagaaaagcatttcaggattggagaggggagagctccaaggctcagcccttggtccattcatgctgtgcctcactcatctcatccaagtccatggctctaaccacctcccacttgccaacaactcccaaattcccttctctggctgtgcctggcgtctgagctccagactcagccgtgggcattaccctggaggcagcttacctgacgtccccacctaagcatctacaccacctcacactgcacactggcaaggacaaatgcccgtcagattacgtcacccctcgctaaaaccctcggagggcttcccatctcactcaccttgtcatggccctacttgattgggccccagccccttctcccacttcatttccttcctggctgttcacttattcgactccagctgtgcaggccttcctgatagttctcaaatgcaccagcacattcagaattcagggcctgcacacttactatacctctgcctgctactcttgccccaattatcttcagaactagcacctctccttccttcagctactaatgcatcagctcctgagaggcctgccctggccacctccctgaaatgatctctttaccttgacacactgtatcccctgatgctgtttcagttttcctcttagcattcataaccacctgacatgtgtttgttgattctctctttctctctccaaaagaatgttaagctcaactaaggccagaatttttgtctttttcactactaaacctcagcacctagaacaatacttaataaataccaagagcccggtaattattggttgaatgaaggaatgcatgagagggtaagaagccagagcatgggaggcagaggtgggaggattgctcaagcccaggagtttgagaccagcctgggcaacatagcaagaccttgtctctaaaaaacattttttaaaaaggtaactggatgcagtgatgtggtggtgcatgcctgtagtcccagctaccagggaggctgaggcatgaggatcacttgagcctgggaggtcaaggctgcagtgagctgtgatcacaccactgcactccagtctgagcatcaaagtgagaccccgcctcaaaaaaaaaaaaaaaaaaaaaaagccagagtaggaaggcacggggtattaacagggtgagggaacagggaggggacctaattggaggtgaggctgcagaggcatgcagggccatgtggtttctgggcagtatttcagaggattagcagggtggtggccctgcaggcttggcgggcaagcagcgagaggctgggagaggtgggactggttgagaagcagctgccacaattccagagcactatgaggaagactacaactagggtggtgacagtagggatcagccacctaactggatttaggaagacagagagggaaacatgagtcaaagagaactaaggtttggagtcaggctgactggacggaggctgatgcaacagaacagagaggttgggaggcaagaccagacatccgcctgggagtgtgtgggagttttctgaaggttctgttcctggttgagtctctaaactcggaggctgagaacaaaaaagtaaagcaggcagacacacctgtagtgtcagctacttggaaggctgagacaggagaatcaatagagcccaggagtttgagaccagcctaagcaacagagcaagaccctgtctcaaaaaaacaaaacatgagcaaaaacaaaaaataaaaacaaagaagtggacagaccatctataggaacttttccgtagttcatattgcctatttttcccccattggaatatggaacctgaccgaaatggtgaaagaaaccccatctctactaaaaatacaaaaattatccgggcgtggtagtgtgcgactgtagtcccagctactcgggaggctgagacaggagaatcgcttgaaccgggaggtggaggttaacttgtgtgttttccctttttaaatactgtatgtgactctataataggtttgtactcattgaaagagctgttgtcaatctgcagaatgttctgatgcactaactcagagaaaaaaatgtaataaagtaagataggagagttgaattaacctcagactgactgaggttaataagtgtgttttccctttttaaatgctgtatatgaatctacaataggtttatacttgttggaagagctgttgtcaatctgaagagtgttctgatgcattaaatcagagaaaaatgaaataaagtaagataggagagttgaattaacagtaattagatccccctttgggtcttaagtaggaaacagacaccccaaatatgaaacaactgcccaaggagggaggagctgtcaggatcagcactgatcatgattaatagcaggtttgcaaaacacagggaagggtcaccctttaaaaactccaaggccgggtgcggtggctcacacctgtaatcccagtacttcgggaggccgaggtgggcagatcacctgaggtcaggagttcaagaccagcctgtccaacatggcaaaactgcatctctactaaaaatacaaaaattagccagatgtggtggcagacgcctgtaatcccagctactcgggagactgaggcagcagaatctcttgaacccaggaggtggaggttgcagtaagccgagattgtgcctccacactccagcctgggcaacaaagtaagactctgtctcgcaccaggcgaggtggctcacgtctgtaatcccagcactttgggaggctgaggcgggcggatcatgaggtcaggagatcgagaccatcctggctaacatggtgaaatcctgtctctactaaaaacacaaaaaattagctgggcgtggtggcgggtgcctgtagtcccagctactccggaggttgaggcaggagaatggcgtgaacccgggaggcggagcttgcagtgagcagagatcgcgccactgcactccagcctgggcgacagagggagactccgtctcaaaaaaaaaaacaagaaagaaagaaagaaagaaagaaagaaagaaagaaagaaagaaagaaagaaagaaagaaagaaagaaagaaagaaagaaagaaagaaagaaagaaagaaagaaagaaagaaagaaagaaagaaagaaagaaagaaagaaagaaagaaaggaaggagagagagagagagagaaagaaagaaaggaaggaaagaaagaaagaaagaaagaaagaaagaaagaaagaaagaaagaaagaaagaaagaaagaaagaaaggaagagaggttggtggctggaggggccacgtggcaggacaggaaggagggtttgagagaaagttcccagaatcctctgaagtcagagatggctcccactgcacgttgcagaatattgacagagctcaggaagctgaaatgaatgggtgggcttgtggaaaggtcaagggaccagaggggcacagagcagtggatgcagcaatggctttggagacagtcggagctggctcggaacccgccttgcacagccttctttgtgcctctttccatatctgctagttggggatattaatagtatctacttcaaaggctggtcaataaataactgatgggagtagggtgtggccaagcaagtgctagctcatcagagctacacggaaagtgggatagagaggggatacctgagctttcccggcccaggaacgcctgagcaaaaatctcgccagtccaggcctgcagctccgaatcctgctgcacagatgcgtcactgggataatagtagcccacgatttctgagacaaagctgcaggaaagagatgctggtaccactggagtaaccacgggctcagtcctggccaggaaaccgaggcccactgctgctcaggcggcagagagacagatagccatgggggttcagcagggacccccaggtgcagctggaatctgagtggccgggcttcccttaagtcccactcactcctgagccatgggtgctccacacttccttcctgcacaggggcctggggggtgggcaggggagtgcacgaagagtctgattcatgctgccacccccctccccacccaggaggaaggaagacctgcctgccacaggccccagcccatgcttaaatgatgcaccagccctgatactctgactccactggacaccccctccttcccctgcatccacacacccccaagcccctctctggacggcagctacctgccatttcagaagggaccccaaactcaattcataccctcaagaattccctatgctagggtgtgaaaacacctgaaatccccaggcgccatgagcgcagggaccacaatgtcccaggccaggagaccctggtgggactgctggtcccgccccgcacctcgcacctctcaatggccgcccagatcttcaggccgtcgtctcggtagtggtagttggggatagccaggacgccgcgggcccgcaggctgtccggaaggcagaaattggtgtaggtgaagtgggccaggcccgtgctcatgaggtagatgaggccttgcctcccgatggacgtgacctgaggacacagcacagctcggctcccgggccggcccaatccccaccctagtgtctgggcacgagatggggctggggactcggcccaaggagggccttcttcggttcaccaagcaatccacggatcaaatacccacgagggcctgcctgacgcaggctgcgcagcttgacgccccattacgtgcgtgggaggagatccttaggtatttggtaactaaaagaatgaactgaaagccggggagcctggctgggctcagggtcagctgagggtagtgctggggctcaggatgaggctgccctgcctgtggacccgtggcccggcggggctgggggcggtgggcgggggcggtgaggctgcgggggcgggggagacagggtctgtgaagggggccggtaggagaccggagaccggcggagtgggcggggctggtggaagaggcagtgattgtacaggtgttctcacaccccaggtgtcctcacaaggggcttgggcgcagaacagggcttgggggcgggtagcggggcaaagcgtcttcgggggcggagatcagtgacccggcagggaggccgcacctggtccacgaggccctcggggttgagcagcgtggccctcgcgatggtgttcacctgcagcgtgtatcgagtgtgggggagtaggagctgcgagcggagcggatcacgtgagctgaaggccggggacaaggccgcccggcccctgccccgctgggcccccacccggggtcgcggaccttgtagatggggtggcagagcggcagctggcgcagcgtggccatggcgaaggcctcgcacagcaaatgcgtgcacagaaagtgcgtgttgttttcgtgcaccaggaactcagagttgcgcacccacgtcttggccagcagccagtcccattcggagtcagtgggcaggaagatggggctgtcaggcccgggggtctggctgagctgcgtccgaaaggaacgagggatgatggggctccgggctggcggttagcacctgagcccccatcccggggcggcggcgccgggctcacctggatggccaagggcaccagcgccccctgggggctgagccacagcaggcacagtggggcggccacgtactgctggcggccgtttaggcagtgggtgggggcctccgccaggatccagtagtccgctaggaagatgttccccctctgcagaaggcacacagaggctgagtgtccctccctactcgcgctccacttccctcccatttccctgcccacttccaccccagagaggagctgaggcccccagctgaggtctcagaaattcttggtgcctgaattaatggccaaagtggggtaccccgcccttcccaaaatgtccggaatgaggtccagctgagtccctccttgtgcaacagctcgcctgctgagacaagccagcgtcctctcctcctcacctcatacctagtccttcccactctcaactcagatggaatccccttctgacatctgagcactatgtatccagcaacagctaaatgaacacatgagaactgaccaaccatgtctctagctttctggaggagaatgcctgagggcttgactgccccaaaaagactgggttagcctcgtctccgacaacctcagagctcctagttctccgtgatcttccctgatgcatctggtggccctaccattggcctgtcctaaaacagctttcctctaggcctcagcacctcttcaggaggcctcaaaacaagggcaagccttcctcaaagatgtccctgcagccaccctgcgcgttcacaccatttcaccaggccccatctcaggcctcaaagcctcccaaccccagtctgaccctcatccgtatctgctctacttaaagtgtgcaggaccatggctgcccagaggatgaggcccacaggtgaaatgcagcccaggccatttccataccctccacacacatcccttgtccataatggtgacacacccacctcccacctatcaggcccactgcccagatccttacccacctctagctctgtctgcaggcatgtgtcctgtcccagcaagggggccaccatgtcattggtgacaggcagcttgctgggcaagctagagatgcagtggagcatgacgggattgacaccattcaggtactggtacccaaagaagtgatcttcacaccagtgctctgtgacatactctgggatacaagagaggggaccagttggtctagaaactacttccctagatcctagtcctgccaagtcctttgcttatcattgtggtttaggttttcttcccaaaaactctatgaggtaggaatcattatatcttcaatttaatactagacactaagggtcagagagatggagtgacttgcacagctgagtggcagagcagggatttgagaacctaagcctttctggacccaaagcccggagcacttggtggttggagtaggggaagagagtcgtgtgtccctgatgaggatcaagattccctaaatgactgtgaccctctcccaggcaagcagagtgtctctctctcctgaatcccctgtttttgtcccctcctcagagaaggtgctttgttctccagaggaatctgggagatgccaccagtgaagccaggagcccctcccactcaaatccagcagtctccctgggagggctgggagagggccctttcccaggaaggagaggaaggggtctgagcatgagataaggtgaggggtagacatctcctgcctggctctgctcacttgtcgtgaaggtcttatggcaccagaagatgttctgcatgtcatccagcttcttccaggagcccttgcgatccaacagccctcgaagcttcattcccaaggacctgatgggagaggaaaagatgagggtgaggtctgggggctagagtctgctgggaatcactgtgtgcccctctgcctggaggaactgacggggtccatccccagagtagagatgcctaacaatccacatgggagaaaaagtctagtacccggtggaggctctgtggcctcggaagaccctggttcatatgcagccatccctaagacaggtcattgcacttgcacataaagttggcacacacggccctatggtgcagacaagccaccctcactggtgttttggcctgtattctccaagctgccctcttgtcacagacctccactggctcccctctgcctacaggacagagccccagctgccaagcctgactagcccatggagatccccaccagccagcttctaccaacctttccagtattttctcccaccctaggcattagacagggccaaccaagacccgctctccaaacatgatcagagacatgctttgtacactggaaggtagaagaggggctggcacgtggagagatgcatactcttcactttgtggatgtctgtgctgtttgaatttttacagtgagcactattttttttttccttctttttaagatgggatctccctgtgttaccgaggctggagtgcagtggctgtttagagacacaatcatagctcactgcagcttcaaactcctgggctcaagcaatcctcctgcctcaacctcccaagtagcaggcactaccatgtagtacctcccaagtagcagatgtgccccaccatgccctgcaacattattttataatatggagaagcatgcttgaaattaaaatggctttcccccacttccaggtcttcatttaatcttcacctctggtagaaagccatctactccatctctatgataaaaatctatctcttctaggcacagctcagaagcaaagtcctttatggagcattgcctgaactcctccttgcacacatgaactcctccatgaacacatgccttggatctttcacactcatcatttcccacattgtattgtaagcccagtggacatatattatccccattatactatgagctcctcagggcaaggacttggctatgtctgccccaccatatccagttcataatatgcactcactaaataagctgaatcaaaggaaagggaatggaggccagatgcggtggctcacgcctataatcccagcactttgggaggccaagatgggccgatcacctgaggtcaggagttcgagaccagcctggccaacatggtgaaaccccgtctctactaaaaatgcaaaaattagccaggcgtggtggtgcatctctgtaatcccagctactcgggaggctgaggtgggagaattgcttgaacccaggaagtggagactgcagtgagccaagatcgagccactgcactccagcctgagcaacagagtgagactccgtctcaaaacaacaacaacaacaacaaaaggaatggaacatggaacaagtaggcgtgtggcaataggtcaataacataggatgtataaagatgtgtgggctgggcgtggtggctcatgcctgtaatcccagcactttgggaggcaaaggcagatggatcacctgaggtcgggagtttgagaccagcctaaccaacatgaagaaaccccatctctactaaaaatacaaaattagccggcatggtggcacctgcctgtagtcccagctactcaggaggctgaggcaggagaatcgcttgaacccaggaggcagaggttgcggtgagccgagatcgcggcactgcactccagcctgggcgacaggagtgaaactccgtctcaaaaaaaaaaaaaaaaagtgatgtgccctgaaaagtgtgggcacctggggaagggagggtggcaaggggggatgaatgatcggacaggcccaggaacgatgtcacctgggctcctaagcactcactcactcactgcacacacactcgctgggggcccaattaacacccagtgggtgggaaaaccacgaggagttcaatcatgaaagcagaggctgaggagtctgggggcagggagaggggaactggggagcacaagggggagacaagggcaggaagggggcagggggcatgtagagagggaagactgtggggcagggagagggaatgagtccagagaggagggactggggcagggagaggggatactgggaatagggagaaggggcagtctgggagcacggggagggggatggatgggcagagatgtaagatgttcattagagggacaatggccttacgcagggatggcattgaagagcagcgagatcgtcttggtggctgagtatcgaacattgggctccatgtacatcagggatgggatgtcaattttcatggggaagccgggcaggtaccgattcccactgctgggggtcgggggagtagaaagacagaaaccagtcagtgggccctgaagcccagctgctcaactccttccctctttcctgccttccaagtccctgggtctctcttactcccggctcctcccctgccctctctgctcctgagctaaaataacctcctcactcttgtcccctgtgccagaccctttggggccatctcccatcctgatgcttgaatgaaactgcattgtcatagacccctacccctccttcctggctatcaggaccccatcctcccgacagaccttccacttgacttcctttcccctccttcccaagctttaatcttcacctgtcaccctggtctacacaagttgtcgtctttgtcaaggcaaatttcttgtctgactccatctcctgaaagctgttgacgtctaccatgcaggggaagccaggggcatagatcttccagcttccgagggaaagaggtcagaggtggcaggtcatgctcgggataaacacaagtcttagctttaaagacacggcttcagattaaaacttcaaaaaccacctactttctggatgagtgacaaggaattggacatttctccatgaaagcactggcttcacatagggtagcatttaaggatggcattaatgcccacactgggttagagatgggtttgtgttgagattaaaatcatggccggtttagtgggggaggctgagaaaggactgagattggtggatacttcaggtcacttctgatattgggatctgggttacatcagggacagttgagggctgagtatggattcattggtggtgttgggacaactgttactattggtgttctcagttcagattcagggtcactattaaagtggggttaggtccaaataagagtcctgatccaagctaggcacccaaggttgagaatgaggttagagttaggaacaatctgattaagactgaggtcaggataaagatggggaaagaagtcaaattaggccaccctcaccggtagcattcttgtcgggcccggagctcccgtgtcctgtgatccaggaggaggggaagagagtcctgacaaatagttcttgctgtggggaatgaaaattactcttggtataagtctcttttccaacaacatcttctgcaaaccttgcctgaaccccctgacccttgaacccaatccgacagccacatccctgtgaaacacgtggcggtgcccccacgttctttgtgtattcatcagtagaagggattcaagacagcttcacccccaaattatagcaatcttcccaattgttggcatgtttatctcccctccagactataaactccctgagggcagaagtcgtcttgtattcctttttcttctttttcttcttctgtattcccggcttctagcatggtgcctggcaccatgtgtataagatgcactttaaatgactgatgaacaaatatattttgtgaagctatggatggatgtgctgtggagatggatgagagtttatagtgaggtctatggaaaacttattacggaccatggggtaatattcatttgcctcactttgacctagaatatccctccttcatcctgagcctcctcccaacacccagagcagccctactgttgcctctccagatcagatagctctggaaactgaagatgctcaagcccagcatctgcagaaggccccagaaattcaacaaggaatcctagcagcacctctcagggacctcatccacactagaaaagctagtagtaggggagggaatggggcctctccagctaaaatctctgagcagccagggcttctctacctgttaaaatctaatgactcagggtgcaggttagttcctctctggggtctggaggaactcactctggagaagtgcagagggaggctgtggaaagcaaagtgcttcctatgtgtatgagagaagggtgcctgcctatatgagtgtatgtgtctatgtgagtctccagaagagtcaataccgtctgcaaaaccctcgcatttcagggcttgagaggctcccttttttcagaaaacatctacttgggagcccagagtttctgacctcaatcttattccctatactctggggctctgtgagaccccactcctaatcccaaaggacaccttctgcagtacagtgtagtcctcgtctctggcccacctgttcctggcctcagctccacggtgcagtagccttcaatccactgatagcaggggaagtgggatacactaccatccggttcggtgacacagatgcggctacagtaccaagagtccttgcggaagaaagcgtagcgctccttgtgtacacgcagcagcaagagctcacccagctccgctgtgcaacgcaccttgtacttctgtacctgaggggaccaagacagcaagcaggtgagaggcggggaactgccaaggcggtccttgcgccttgcaagatgcatctacacctaagcctattcgggcatacaaacctgagctgctcccagcccataccgggcttttgtatgaattagaaaaagcttccccgggccgggagaggtggctcacgcctgtaatcctaacactttgggaggccgaggcgggtggatcacctgaggtcaggagtttgagaccagcctgcccgatgaaaccgcttctctactaaaaatacaaaaaattagtcgggcgtcgtggcaggcgcctgtaatcccagctacttgggaggctgaggcaggagaatcgcttaaacccgggaggtggaggttgcagtgacctgagatcacaccactgccctccagcctgggcaacaagagcaaaactccatctcaaaaagaaaagaaaaaggtgcccgagcacagtgggcactgcatttcactagcttcctaggccggctgggaactcttgtggaggccacctggggctggcagaggcaggcagatcccctcgataagaggaaacccaggctcagagaggggaagcgacttgcccaaagcccacggtcaattatgggaggagtttaggagccaggggaagtccctctactccctgtccaacgctccttcctctccacagtcctgcctggatggagttcatcatctccaggaaagacagggacctcaatagggaaggtgaggaggtcagggccggtatcctgagttcagcaggatctcaagagtccaggaggaatactcctcccgcctgcggcccctgcccctctgaggtcgcgcttccctgtctcctttgtactcaccgatccaggggcgaagtccctgcccattcgatctagccgctgcttggggctttcaccacacgtgcccaccagtgtgacagagatgttgtccagtgtgccggccctcaggtagggaccagtggtcacacacaggcggtacactgccatgatgggaaggaggaagggatgccccggcaacgctggccgcagcagcagccggcctggaggagaagagcggcacgccggacagggctgggtttctgggcggagggctaggggctgcggggctgggtagggctgaggatgggcccagctctctctgggatgttcctgggctttctctctccgaagctccctgctggcggctcgggcttcctctctccgcccacagtcttgcactctaatacttgtttgcttgcctctgacacagccggtccctctggctggctcacccagatggatatcaggagcctgggttccactgcggagggagggatcagatgctgagatggagaaaaggaggtaacgcctgtataattgggacactgccctccgcctggtcagcggcccggactgatgccctggagtgcttgtccgcccactccccaatgtcccccaagatctgttcctccccattcccaggcagagatgagcacagggcacctgcattcctacgtgtgaatcatccgtgtgaatcactaaacagtggagagttgcacttggtcataaatcacacgtgactgcagccacacgcaggtgagtcgcacacgcattccagcacatgtcaaatggtcaggaacagctccctgtcaccccatacaccgatccccccacgcatggccctctttgtccccagcctttggcacgcccgacctcattctctgctctggagtagggcaggtcaggaaagcgaaatacagcgccggcaaacagggtctgaatgccccgcgtggcattctttccgctccaggaccgccctgggcctgcaggatcctgggcgggagcccaggtgtccgggatctgggccactagggactggggaggaacctctcagagaagcccatagcccgcagcggccccgcgcggccggttccggcgccgcactgttccagcctctactatggtacagtccctgcgtcgcagcctcggcgggggctctaagaacgggaggcagaaaaagctcaatcagcagcaggcgagcttcacccgctgcttccaaatctgtgccaaaatattctatgctgcacagataaaatcctctgtcggttctacaagcctggcttttcctatagagaaccctcttataagcaaaaagtaaagctctcgtgaagagcccggatagctcagtcggtagagcatcagacttttaatctgagggtccagggttcaagtccctgttcgggcggcatgtctttgcttttgggtaccgcacttcgcataaaatggtaacaaaaatagttactagtttttaaagctaggtgatacagaaacttgatttccacaaaatacagcaaacgacggtggagggtaataaacatactttaaaacagtacaaacgcgagccgtattatcgaatttacattttctggtagccacattacaaagaataaaaagcaagcgaaattaatttcacggatctattttacttaccctaatataccaaaatcttattttaacatataatcaacattctaaaaatattaatgaaattttaagtctttttgtttgtacaaagccttccttcaaaagaagatgtgtatttagaagctggcaatacatctgaattcatatatttcaagtgctcgataacggtgtctaccatatccaacagcagactttgttttgttttcgttttaagtgacgggtgtggaagacacgcaaaatagaatgtccagtaatgtacacaatcttgaaagacaccacgagggaggttccatggtgtaatggttagcactctggactctgaatccagcgatccgagttcaaatctcggtggaaccttgaagcttttcttttaatatcagcatgttgaatattgttaattgattttcacagaggggatactcctatgacccaagataatacgacaaaaaaaaaaagtaaactaggacactaccaattatttgtgcttttcctaccggataattgagtcctataacacagtgttaagagaacgtacaataaattatttaaatatgttggaagttgagctaacatttgaaaacatgttaaaatagagatgttatgaagaaacgaaataatagagatgttatgaagaaacgaaatattgcttcagcagttaccatcaggtcttagcttctgggatggatgcaggcctatgatctctctggaagaccaaacacggaagatgatggtgaaaccattaccaggggaattcgtaaaattactttctgcatgtaaataggtgtaacctcacagaactgttaacagaactgtagcaggtgcgtaatccaccagaaaaactccagcctggcagcggtgggattcgaacccacgcctccgaagagactggagcctaaatccagcgccttagaccgctcggccacgctacctgcacgaaaacttactgtccccgttgtcctcctaagagactagaagtaaggaatggggcaaatcttaagagtgccaaattgattcgtctccttttccacatcttttagactggaaatgaagaaccatcgagactgtggaccgcatagcagcagatggcagaacagataaacgagaagagacaaaaacacacagaaatttacaacaaaactagtttatttgggtgggactatatctgggagtggggagcgcctgagccggaaacaccccccaagcgggcagccggagctctgcactcgctcgctcagccattttcggttgctctccctccctgttttttcgacccatgtgcgccctctctctcacctggctaacatgctttgcgcccgctacctctacctggcttggcctctgagatccaaaccgcgccctcctggcatgtcccgcccaagtcccttagccccgctccccaaccctgccccattcccactctagtacccgtaagctacaagacgccgccgttcgtcgggtggctctgtggcgcaatggatagcgcattggacttctagtgacgaatagagcaattcaaaggttgtgggttcgaatcccaccagagtcgattttatttcaatttttcctttttatccgtttttttcttaaaggcccccatcccttctccccctaccctatctctctctttccacctggtttcaatttcgatctcagttcccgctctgctctcttctttacttacctgtctgccccggggcttgggccatggagagcaggactgagggtgggagacagaagggaagggaaagtgggcgtggacgtcgagataaaggcaggcccctggctcggggacacacggggatttaataaccactttattccatgcactagggactcgggaagggactgggactgggctgaggggcagagagagtacaatcctagacgcaagggagaagttggggcagggaaaagggacaggaaccagggaaatatatatttatatagatactctaatatagaccacatctcacccgcgcgctgagcccgcgcgccccactgccctccccaacacctgctcgcccggacgcccgggtccctctgctgccctcgggctggagtctctaccccacccctagaccccgcccccaccaccccccaaggctcagggccaaggtctccagaaagcgggcggcgggggcagcggggccttgggcgccccgtcttgtctgtgaggcggcggtggcggcggcagcagtccggtgaggggcgccggcgcgccagaatccccggcgcgcggggagcagagggatggggaccatgcgcagcgcgggctagggtggccctggtgcactggggggcgctggtgcagcgcagggccaagggccggtgcggcggggtccagggatgggcgcggcgctggaggcctcggatctaccggcttgggccggggcggtttggggcgcagatagccgtgcagcgcggagaagagctgggcgcgggcggccgggctggcgtcgtgcgcgaaggccgccaagcgaagcaggcactcgcggaaaccggacaagtagcagctggcgagcgcctcggcgtcctggactggggaccggggaacccctggagccgcggcggctggtgcggccggcgggagcacaggtgggcagggcaggggcccggcaggggtgagggaaggggcggggcgcagagataccaaggccggacaggcgcacagagacaggaagccagatggacggaaagagggagaaaatgagggagacacagagacagacacgcgcgggtgttattaacctcgcctcggagcagaaccggccactccccaagcccaccatccaccgcagggcccgcccactctgccccggccggagcctcctggcgtcccccctccctccctccgctgccccacccccgcgctgtacccgggggctccacccggcttcgctccctcaagtagcccacggcgaactccaatatctccgctttctccagcttcgggttccggaggttctacagacgggaggggagggcgcagagacagaaaggggtggggagaaagggggaaagtggcagggggaagaagggagggacggatgcgggagctggtggtgcccccgatcgcatttgcgcactgcccacagaacgcgcgaccaaatgcggagtggagatgaccaaggaaagtcctggcccaccctgagacgaaactgtccaatcctaggggttggaaccaatgcccaacgcgtgaggaggagatttgaaaccgcaacccagggaatgaaattaaccacccgacataacagaggctggctcatcagaggctggctgtgggggagggggaaccggacacttagagacccaaagggtgaaactgaccgaccccgggagcgaaatttacagaaccaggcgtgaaacttacagacccgaggggtggcgaagaagatcgcgttctgagagcgagtgggggtctgggatggaattccaaaggcgggactcgggtgaggatgccttggggccagggttgccaaccaagcttgtgtccccaccccagtgggaagccctgggacgcggaaacgggaagcttggggacctagggctagcggagggactgacctggtcccgggtccgctccagcagcagcagcctcagctcttccaggctgcggttgatgcggtcccggcgccgcttctccacaagcggcttgagcatctgcgaccagcgagaaaaggagagcgggccgaccagaccgagactcagtgcggccgccccggcgtcggatcccgccgctgggagagcccggcttccaccccggccacaagaccccagattgcctagggccggccccattcgatccctctccgctccccctcccaatgcccctagatcagtttctgtagctcgcctccccggatcttcgcattctcctctctcagtctcgtcctccctcctcccctctctgtgtctctcctcctcttttctctctacgtctccgtctggtgcagtttctctttgtctcagtggagaactttggggactctctgcgcgcacgcacgtgcgccgcacggtgccgggctcagacctggcggccctgagtatagaaagggagatacctagcgcgaccgcgccgcctcttttccctcaaaaccctccaggccttcaccttctccacggttctcctaaaatcttccaccagtctggggcctctggaaccaacgccccgggaccttctgtacaagaccgccttgggccagccccgcccggctcacagccagagtggagcaagtgcctatcctcttctcttttcgttcccaccctcctcccttggctctgccctctaattgcttattttactccaacaccggccccctccccaggccacaaggtgccgacacccattaccgaggcccctagtcctatgttcccgccgcccactcaggtctggctctgacccctgtccccttcttcatattttgcagcttcctctccagcttctggctcctggagttctggagcaccgctccccttccacccctgcgtccccagcctctctccagaccgacggcgtcaggggcccagtcccctagccaaaccagggacctctgctccctcccctcccgcctctcaccttggggccgtccctattctcagctcgatcccgggtgaccattgctcctccggaccctgtgtggaccggttccctgctcgcctggagccttatattccgcggcccaagggtaggagggataggacccgaccccgcccccttcgacatccagattctgcccctctaggacccggcacgaggctcccggaaagaggaggagtgaaggggggaggggaaggagagaaactggcctgggagtgcgggaagtgaggggtgaatgggggcactggctggtttacagaccgtaaggctgtataaggaggcgggacccagctgaaaggaggaggctattggggcagagctcgcttggggatgaaattcagagttcctccagaattgcagctttctgggaggcttactgtaccctcactaaccctgaaatagaagttagcacctctcagcccccaggctgaattttatacatcatctccgaagttcgcttcctagtcgagacagggagcaacccgagtgcgctgggtgaatctgtccgactcaaccgaagctctgccgggaggttggagaggcgctctcttctatctaagccagttacattcaagtccgcgaacatctgcgcgcccactctgcggacagggcacttgtctaggctcgggcgagtcatagtgagatacgcaggagagacccagcttatccctgcaggatctaatggaaaagaccatgtgacaccaagtagctattacagaagcccagtgaagtaggtgctccgggaaaaggtctccttaaggatggctggactgaggaggatcttcaaggcagagggagcaagtctttgaaacataggtatgagtggagaggtctttccacttacagtacaagtatttgattcaaaactagtcataggagattcaggagtgtggctgataggacacctcacgcaagtgtgcccgcattgcttgcttctggaggcccctggtgactgtagggtagcagggagcaggcagtttactaaggggaaagcaaggggtacaaaaaagggatcaacacccacctcaaaccaagagcatgaccctccgcagaacgatgcctgaccactcgagggcttcaggacaaagtgtctgagaagataaatcagaaactgaagggaacagccaggttgccagggataaagacacggaaagacagggttgcagaccgagacggaagacagctgtgaaatcagagaccaatggggtttccttcaagccctcccaacggccctccgcaccttggttttgtcacgaagcctttcttgccatcatagcccgagccgggagaggcacagaccttgaggagggggctcccatttgggatcagggcccccagcacatcccacctctccgtccttcagccaaatgggaacgcaaatgtgtgtccccatcagcccccgccgcccccctccttgggaacctgggctcgggctgaatttttctcacctgcacgcgaggctgggggcccccggctgttcgcacccgggtgtggggccgcccctggccatatggggcggctttatggcccggtggccggatccggacgagaggaaggatgacttggcgctccacccacggcaaccattcgggaccacttccctggcctacaccgttgcctgtccgggtccgcctcaacctcttacaatctcagataggatccccgcagaatctttaagccgcgcattggtggttcagtggtagaattctcgcctgccacgcgggaggcccgggttcgattcccggccaatgcacgagtacagttttcttttctcccctccaaaaaaaggataatatatttggtagcatttctaagaaacatcttcacttaaatatttctaccaaatattaatcttaaccttttgactatagcagagtttgcagccccaggcctaaacgattccgcacgccctcgcactcccctcctcccagcatgggggtcctgcagcctccacacccccctccctccgtccccggcccgcacctccgcaggcgtgaccctgagaaaggacacagtgctcggatctcggccccccgcgggggaagggccaggtctccccgccccccactctacatcccttgttctttccacctctcttcctctgttattttccgttctctctgaagcacgctttcttttcttaagtctatgggtctatgccttttttgtctcgcctcctttccgggtctctgagtgtctcttagctcctccatctctgtatctctcacgttttttccagatcttcagcgacttctgccctgggtctctctggtgttggtggtctcctccctccgcatctctgattccgcgtctctccgcgtcttggcgtctgcatctccgcctctggctctctcgggtctctggtatctcgtcgtctctccgagtctctgtcgcctcccgggactctgcgctcccacgctcctgccatcccctgggaagctcgctgacacttccaggttcctgccacctcccctccccgccccttcccggccgctttgatcccgcacgcgtcggcccgagggcgggcgggtgggcgcacagccacctgcggcgaccacttgtgagcggggcggggcgggccggctgggcggggcggcggggctccccgcggtccgctcccttccggcgcgctccgcctcccaccgctcgcctcctcctggctctgtccgcggtcgctgccggggcctgtgggctcggggctcaggttcgctgagtgaatctgggtctcggccttagtctatctgggtctctgtctctggaattcaccctggagctgtccctcccgtttctttcaacctgttttatttgcgccagggtctgggtctctgtctcgtcctcggattgtatctgtgactgccaatgctctgttcttagcgctaagtagtaaccgtggcctccagaaggaaactgttaaaaaaaaaaagtgcatctatctatatgcctgtgtgcgcagctgctggatttattcggtcagcccatatttatggggtgcctcctgtgtgccgagtactgtaaggagtacattgggtctgggctttcctgaagcttatattacagagggaaagacagacaataactacgaaagcaaaaaataacataagatagcttcagatggttataaggctgtgggaagaaaacaacaacaacaacaacaaaaaggtcatggcgatgacttgaaagtgaagggctactttactctgggtggtaagagacagcctctatgaagaagtgatatttgatgccagcgtagtcagcagccttgagtccaggcaaaaggatctgcaagtacaggctctgaggcaggagagctatttgctggtgggagctggagaaagaggtccggcgaactcgggatggaggatttgcagagtggcagagatcagattagagagtcaggcgtagcccatcccacaggatcttggagagtattgaaggaatttggattataacggcaattggaagccagtgggggattttcatcagcaaagttatattctctgactgatgttttaaaagatcactttggggccaggcgcggtggctcacgcctgtaatccccgcactttgggaggccgaggcaggtggatcacctgaggtcaggagttcgagaccagcctgccaacatgggaaaccccgtctgtactaaaaatacaaaaattagccgggcgtggtggcacacgcctgtaatcccagctactctagaggctgaggcaggagaatcgcttgaacccgggaggcggagtttgcagtgagccgagatcgcgccactgcactccagcctgggtaacagagcgagactccgtctcaaaataataataataattaataagatcactttggaccggacgctgtggctcacgcctgtaatcccagcactttgggtggctgagtcaggcggatcgcttgagcccaggagttcgagaccagcctggccaacatggcgaaaccctgtctctattaaaaatacaaaaattagccgggagtgatggcgtgggcctgtaatcccagctacttgggaggctgaggcaggagaatcgcttgaacccgggaggcgaggttgcagtaagccgtaatcgcaccactgcactctcgcctggccaacagacccagactctgtctcaatgaaataaaaaagaaaaaagaaaaaaaaattagccaggggtgatggtccgcgcctgagaggggaggctgcagtgagccaagatcgcgccactgctctacagcctgggcgacagagcgagactctagatagatagatagatagatagatagatagatagatagatagatagatagataaaattaaaagatcgcttttgttgctatttggagaatgaaggcagagggctcattcagggggctgaagcagtcttttaggcaatgccttgaggtggtggtggggagagaaaacatgaaggggttactcctaggtctttgtcttaggtaagatcatgtatttgcttaacgtgcggatatattcaaagaaatgcgttgctaggcaatttcattattcagacatcacagagtgtagtgatgtaaacctagatggtagagccttctacacacctaggctacactatacagcctattgtgctcctaggctgcaaacctgtacagctacagcatggtactgtactgaatgctggaggcaattgtacacaattgtaagcatttgtgtacctaaaaggtaacgcatggcactacaatgttatgatagctatgccatctttgggtgataggaatttttcgggtttttttttcctttttgttttgaggcagagtctcactcagttgcccaggctggagtgcagtggggcgatcccggctcactgcaacctccgcctgccgggttcaagcgattctcctgcctcaggctcccgagtagctgggattacaggcctgtgccaccacaccccactaacttttgtatttttagtagagacggggtttcaccatgttgctcaggctggtctcgatctcctgacctcgttatctgccagcctcggcctcccgaagtgcttatcaccgagcctggcgataaggatttttttttagccccattataatcttgctcttgttgcccaggacggagtgcaatggtgggatctcggctcactgcaacctctgcctcccgggttcaagcgattctcctgcctcagcctctcgaatagctgctcgaatatctgggattacaggcattagccaccacgcccggctaatttttgtatttttagtagaaacagggtttcaccatgttggccaggctggtattgaactcctgacctcaagtgatctgcccgccttggcctcccaaagtgctgggattacaggcgtacgccattgcatccggcaatccccattataatcatatatatatatatgcagtccatcattgaccaaaacattgttatgcagcgcatgactgtaactgggtagacggtggtggtggcttttaactgagatgggaaaacctgtggggtcggggagaggtttaggaagagaaatcaagcattatactttagccatattagttaagacatcctggccaggcgcggtggctcacttctgtaatcccagcactttgggaggccaaggcgggtggatcacgaggtcaggggtttgagatcaacctggccaacatggtgaaacaccgtctctactaaaaatacaaaaactagctgggtatggtggcatgcgcctgtggtctcagctactccagaggctgaggcaggagaatctcttgaacccgggaggcagaggttgcagtgagcctagactgcgctattgcactccagcctcggcaacagaggaagactccgctcaaaaaaaagatatctaggtggaggtcacacataggttagggatatacaagtttggagatcagagctggagggtaaatacgctggagtgattgggagatagacgtcttttaatgctataagactggagcacctagagagaaaatgtggcgggaaaagactgaacatgggccgggtgtgttggctcatgcctgtaatcttagcactttgggaggctgaggcgggtggatcacctaaggtcaggagttcgaggccagcctgcccaacatgacaaaaccccgtctccacaaaaaatagaaaaattatctgggcatagtgacgcacgcctgtagtcccagctactcaggaggctgaggcaggagaatcgtttgagcccgggaggccaaggttgcagtcagccgagattgagccactgcactccagcctgggcatgagaatctgtctcaaacaaaaaaaaaagaaaaaagaagaagaagaaaagaaaaggctgaacatggacctctggggcaccccaacacctagagattggttgaggaggaagaattggcaacggagactagagcggtcagagaggcaacaggaaaaccagggggagtggggtgttctggaaatccagaaaagagggtgtatgaagaaggagattttgctatctattccacagcatggttagtaataacgtattgtatattatgaaattattaaaagtctattttaaatgttctcaccacgaaaaaataaatagatgaggtgatggatgtgttaattagcttgatttaatcattctacaatgtatccttatatggaaacatcacattttaccccataaatatatataattatttgtcaattaaaaataataagtgaggccgggctcaggggctcacacctgtaatcccagcactttgggagggtgaggtgggcagatcaggaagtcaggagatcgagaccatcctggctaacacggtgaaaccccgtctctactaaaaatacaaaaaagattagccaggcatggtggcaggcacctgtgatcccagctactcgggaggctgaggcaggagaatggtgtgaaccccggatgcggagcttgcagtgagctgagatagcgctgctgcatgctagcctgggcaacagagcaagactccatctcaaaaataataataataataagtgaatgaacacttttttctttttttaacctgtatccaacaagaataagtaattttttcctttttcttttttctttttttgagacagagtctcaaaagtctattttaaatgttctcaccacgaaaaaataagtagatgaggtgacggatgtgttaattagcttgatttaatcgttctacaatgtatccttatatggaaacatcacattttaccccataaatacatataattatttgtcaattaaaaataataagggaggccgggcacagtggctcacacctgtaatcccagcactttgggaggctgaggtgggcagatctcaaaaaaaaaaaaaaaaaattagccgagcatggtggtggtgcctgtaatcccagcttctcgggaggctgaggcaggagaattgcttgaacccgggaggtggaggttgcggtgagccgagatcatgccactgcactccagcctgggcaacagcaagactccgtctcaaaaaaaacaaattgtgcataccttcggcatttcactgcaactgacaaaggccagtctctactctggctgctcctgcggcccgtccatcacatcaccactcatccccagtgttacagtggctggctgtgagcattttgggggatctagctgtggagaaggtgagttggatttgtgggatacatttagatgatttgtagtcacttccatatataggttttttttgttttggggttttggtgtttttgtttgtttgttttgctttgtttttgagacagggtgtcttgatctgtctgtcccccaggctgaagtgcagtggtgggactgcagcctcaacctccagggctcaagcaatccccctacatcagcctctggagtagctggaacaacagatatgcaccaccacacccaggtattttttttttttaattttaattttttgtgagactggggtctcactatgttgcccaggcttgtctcaagtgatcctcccatcttggcctcctaaagtactaggattacaggcatgagccacggttctcagccaatattgagttaagttagcctcctcatctagggtaggaatggcttccagggatactcctatttcctttgcccagtcactaggcttcgtgctggaagtgtgcagggccagagacacatgtgatatgaatgtctgatggctcttgacattatgagtcatgggtggtagaggagaaacaagatttgaaatatagagagttagcagctagtctatggaaagtgctatagaggtgtgtgggcagtaagtactacaaatagctggctgggtgcagtggctcacatatgaatcccagcactttgggaggtcaaggcaggtggactgcttgagtccaggagtttgagaccagcctgggcaacacggtgaaacctatctctgctaaaaatacaaaaaaaaaaaaaaattagccaggtatggtggcctgttcctgtttcagctacttggaaggctgaggtgagagaatcacccgagctggggaagtcgaggctgcagtgagctgtaattgtgccactgcactccagcctgggcaacaggagtgagaccttgtctcaaagaaaaaaaattaaaactgttaagttatttttctggacagtgtgaaatttttgccttttattttattttatttttacttatttatttttgagacggagtcttgctctgtcgcccagactggagagcaatggcgccatcttggctcactgcaacctccgcctcctgggttcaagcgattctcctgcctcagcctcctgagtagctgggattataggcgcatgccaccacgcccagctaatttttgtatttgtagtagagatggagtttcaccatgttggtcaggctggtctcgaactcctgacctcatgatccgcccgcctcagcctcccaaagtgctgggattacaagcatgagccaccgctcccggcctttgtcaccttttaaaatttgtaagttgttgccatctctcatttcactctaaatattactttttgtacctaattttgtactttttccctttttttttttctttttcttttttgagatgagggtctcaatatgttgcccagggtggtctcaaactcttggcctcaagcgatcctctggccttggcttcccaaagcgctgggattctaggcctgtgccacaacacctggccatatttttccttaaacacttaaatagttgtttccctccacacctcccccttctaaatcatttaagcttcagactcctggacctaggtctgggtaattttctggagctcgttggtccagtgcagatgtggcctatgaagatgttctcccactcctatccccagcgtatctgtgtcacagagtgtcagtgggggtctccgtgtggttgcacgcctctgtgtcagcgtgggcctgacacagtttgtggctgtgtccatttataccgtggcctaatggcgtgtgtgtggacgtctgagcctccagcctcttcctggctgccctttcaacagtgggccacactggggcttgggggaggggagctcgtgtcccacgtgcgctgggcttaaggaacgcagggggtggggaaggaacggagtagccggtagagcatcccagcctcccctccctcattgtgaagtctccccagtcctgatttccaagacttagctcctccctcttcagttcttcaaaaggaaggctggtttcctgggagcccctgggccctgggtagagggagttcctggagggttgggtcctgggggattgggggttgggaagtaagaggaccaggaccctgggccaaggaaagaccaggatagacgctctccaggcccgcaaggcaaacttaaggtcttgccccgctcagcttgccttgggtggcaaaatcaaagaaaagagaaggggcagcacagacccaggcagagaaaacagggcagtgaaaccacttgaggaacttaaagccccacaaacacaaaaggtctggatccctgaacctcctttattcttcagcacatatttatagggtgcatactgtgggcctcgatctgtcctaggccctggggatatagccccaaaagaaacagacaatgatctctgcccttatgagtcatacattcttttaggggaaacagtcaatgtacattatacaaagcaaatcatttgttagatggtgctatagaaataaattaagcttgggtggggtgcagtggctcacgcatgtaatcccagcactttgggaggccgaggctggcagatcacctgagggcaggagttcgagaccagcctggccaacatagtgaatccccgtctctagtaaaaatacaaaaagtagccgggcgtggtggcgcatgcctgtagtcccagctactcgcgaggctaaagcaggagaatcactggaacccgggaggcggaggttgcagtgagccaagttctggccactccactctatcctgagagacagagctagatttcatctcaaaaaaaaaaaaagaaagaaaagaaaagaaaaaaatcaatcagagaaggggagtggagagtgagaattgtaattttagatgtcatcagggacgatcagcgaaggattcattgagaaggcgaaatctaagtgatgactgggcaggttatgggataactggggaagaacatttcaggcagagggaactgctagcacaaaagccctgaggtggcaatatgtaagaatatttatttatttatttattcattttttgagacagggactcgctctgttgcctaggctggagtgcagtggtgccatcatagctcactgcagccttgaactgttgggctcaagtgatcctcctcaatctcccaagtagctaggattatgggtgtacaccgaaaggcctggctaatttttttattttttgtagagatggggatctcactacgttgcccaggctagtctagaactcctgggctcaatcagtcctccaaaactccaggatttgcacaggcatgagccactgcactttatttatttatatcagtattacttttgggtttttattttattcatttattagaatccatcacaatctttattttaatgctcaaattgtcccagatttagccaatgggagcccctttggctgtagaccctagctgctgtcttttttgatatacatacccaatattctttgagcatttctttacattctggtgcaacaaaatgttccaagatcatcttgtaattcttcagccccagtcctggaatcagcctcgtctctaaggagtcctgtttcattttagcacagaatggcatttagtaaccaagatctgggcatttagtatgggatatcattgtttctaggctcactcagtggacagagctaggaaatatgtgtatgtgtatatgttgtgtatgtgtatatatttattatatttattcctgtatctgtacacataaaaacaatgaattcatattgatacctccattagaagacttcaaagagaaatgacagaatccgatttatgtttcttttcttgtttgtttgtttatttctgagacggagtctcactctgtcgcccaggctggagtgcagtggcatgatctcagctcactgcaacctccgcctcccaggttcaagcgattcgtctgcctcagcctcccgagtagctgggactataggtgcacgccaccatgcccggctaatttttgtatttttggtagagatagggtttcaccatattgaccaggctggtcatccacccgccttggcctcccaggtgctgggattacaggtgtcagccaccgcgcctggtccctgatttatgttttaaaaggatcaatctacccaatatattaagagtagaggccagccaggagcggtggctcacgcctgtaatcccagcactttggggggccgaggcgggtggatcaagaggtcaagagatcaagaccatcctggccaacatggcgaaaccccgtctctactaaaaatacaaaaattagccgggcatggtggtgcgcgcctatagtcccagctacttaggcagctgaggcaggagaatcgcttgaacctgggaggcagagccatgcagtgagccgagatcgtgccactgcactccagcctgggtgacagagccagactccgtctcaaaaaaaaaaaaaaaaaaaaaaaaaagagagtagaggccaggcgtggtggctcacacctgtaatcccagcactttgggaggctgggtgggggggtatggatcacttgaggtcaagagttcgagaccagcctgggcaacatggtaaaaccccatttctactaaaaatacaaaatttagctgggcgtggtggtgcacacctgtagtcccagctacttgggaggctgaggtatgagaatcacttgaactcaggaggctgcagtgagcccagatcacgccactgcactccagtcttggaggcagagcaagaccctgttcaaaaaaaaaaaaaaaaaaagtagactctggaactagccaggaaataacttagggggtattgcaataatctaggtgagagatgagggtggcttggaccatggtgtaatggcaaatagtcaaatgttagacttttttctttttttgtttgagacagggtctcattccatcacccaggctagagttcagtggtgtaatcactgctcactgcagcctcaacctcccgggctcaagtgatactccctcttcagcctcccaaatagctgggataacaagcatgctcagctaatttttttttttttttaatcttcacagagactggggtcttgttatgttgctcaggctggtcctgaactcctggacgcaagagatcctcctgccttggccacccaaagcgctgggattacacgtgtgagccaccacacctgaccctaacatattgtaaatagaaatggctcatttgatgtagagtgggagagaaagagaacaatcaaggacgacgctaaggtttttagtctaaataactgaaggaatggaatttccatttattgagatgaaaggatcacaggtgaaggaggtttggggaagaagcctaggcgtttggtttgcacttttttttttttttttttgagacggagtttcactctttttccccaggctggagtgcaatggcatgatctcggctcaccgcaacctccgcctcccgggttcaagtgattctccttcctcagcctcccgagtagctgggactacaggcatgtgccaccacgcccggctaagtttctgtttttagtagagacggggtttctccatgttggttgggctagtctcgaactcccgacctcaggtgagccgcccgcctcggcctcccaaagtgctgggattacaggcacgagacaccgcgcccggccttggtttgcacattttaagtttgtgatctgtattagctttttccaagtgtagatgatatgtgggcaataatacataagcatctgtaactcaggggggagttctggagctggagatgaaaatctgggatgtattaatgtattacctgatatttaaagccatgaaactggaaatgaccaaggtagtgggtacagatagagaagaggttggaaaattgagccttgggaacagtccaacatttagagatccagaaggtgaggaacagcaaagaagtctgagaataagctgctgatgaagtagaaggaatatcagaaggacgtagtgtcctagaaggcaagcgaagagtgtttctaatggaagagtgagcatcggtatcagcttccacgaagtaatggtcaatagatttagcaatgtgatgatcattcggcaaccttaacaagggcagctttgatgggggcggtggacacctgattagcaagggtccaaaggagagtgggaagatggaattggataacttgctctgtttgctgtagaagggagtagagaaattgagtggtagctggacaggcgtgtggggtcaagatagcttttgttgtcttgcttctaaattgggggaaattagtgtctgtaggctgaagagaaaaatcaagtagagagggatttttttttttttgagatggagttttgctattgttgcccaggctggagtgcaatggcgcgaccttcgtctcccggattcaagagcttctgctgcctcagcctcccgagtagctgggattacaggcgtgcgtcagccaccacgcccggctaattttgtatttttagtagagattggggtttcactggtctcggactcctgacctcaagtgatccacccgtcaagcctcccaaagtgttgagattacaggcgtgagccactacgcccggctgagagggaaattttgatggtataggaaaaagcagtgtctttgagatggccagagggatgggaaatctagtaaaagtaggggttggctttaggtggaagcattcttctacaataatgaaggaaaagaagagtacgtggtcaccgactcaattaggtaggtaggtaggtaggtgcgatgtgaatgttgatggggaactccggaatggtttattttctcagtgaatcaggaagtaaaagctgagaagggattcgtagtttgaggtgagggtaggaatgaaacagtctcatggggcagtatgagagtgaatgaattggaggaaagtaacgattgctgagtagcactaaggagccacccgagtgtggtggcgttaggaattgaaatccgcagtaaaaaagtttttgcaggtcgataggactatgagaatcgcaagagggcgctcgcgggctggtccctgacggccgagtctctgagattctcagaataacgcgggagattctccaaggaaagaaccagaaaacaaactgctttttccttctccagagaccgagatacctaaataccaaaactagtgacgctgtgagcaggattcgaacctgcgcggggagaccccattggatttcgagtccaacgccttaaccactcggccatcacagccgcgtgcgctgtcggccctgtgcaactatagctgcctatcaacacgcccgcctccagccggctccgcccggctccgcccggctccacccgcgccgcctagagacgtctgcgctcgtgcgcctctgctcggtggcgcagaccatgccttccctccagcagacgtcagcagccccattggagcggcagccttcctattctccctctcctccctgagcataggatggaaacaaaacgggtccaaatccgagccctgtcttccatactcttgaggacagaccctgagatgcctacttcaggctacttcatgaaaccgaagtgagaatctgtagtttccaatacacactaaaagtgcagggaaacggaggtccaaagacggattggcatgtaagaagaatcttagggagagtctagaagaaatgtttcttagaaaggccctttgaaagtggagaagtgtacttgcagcaataatatatcactccccgctaactcaggcaccgctgggattcgaacccaggatctcctgtttactagacaggcgctttaaccagctaagccacggcgccggcgtaaaacaggtgttcctcaagataaatcaactcttagtgggtgacagtaagtgaaaatcagcaaactgcctgcagtggttcctcagtgactcatcccttcctaaggtgcctcttccctttcaggttctgagccaaagggttaatgctttgcttctccattcttccacacctttggggccaactcaaccatgagtgagcacatgactccatgtgtcccttagctacctagactgacctgctgaagggccctctctgtgtggtgaccaagaagccaaggaaggccgggcgcggtggctcacgcctgtaatcccagcactttgggaggccaaggcgggcagatcacctaaggtcaggagtccgcgaccagcctgaccaaaaatggtgaaaccccatcgctactaaaaatacaaaattagccgggcgcggtggtgggcacctataatcccagctactcgggaggctgaggcaggagaatcgcttgaacccgggaggcagacgttgcagcgagccgagattgcaccattgcactccagctgggtgacagagcgaaattccgtctcaaataaaaaaaaggaagccaaggaagacaaacaccctcgaatacctcagggcaccacggagttaagcagggttcctctgccttggccacccgtgacccgggctggagcttacccaagcccttggccacacgcacctctcagctctccttcccagggcaaacccagctgaggccatgctagaggggacagcagagtctgagctggacgtggacgtagcgggctcagcagggccctcacctggacaggatgggggaaaagaggaatgggggtcgtcaggagatggccctgtacaccctcactacaaccttcccaaaagcagggccacatctccccttgacatgctcccctcaccccaaccccaaacttcattccacaaagtcctgggcgtttttatctttttgtattaaaaaagtagtaacagacacaaatatcaaaaacacaaatgccatcggcagagggtacagctgagaacgcctgggtcccacctgaggggcagcaccagggactccatggtccaccaacctcccccactccagagcagctaggggctggaacccccgggtcctgcttgggcctcaggctctcctcccatctggggaggaggtgggagagagagctgtctccccgcaataaataagtgcagccccaaccctcaagagtcagattcaggctcagctggaatatggagaggccacttcagcagcttgtcagcaactttgtccaggggagggaaggattcctctccaaaggtgggaggtgacactcctctgggctgggctgcggagttctgctctctgctccctaagaggccagaggcagcccctggatcctaggctggtgatgggggtccggccccctatggtgggagaagctggggcagtttcccactggttggtctagccacatctgagttctgagaattgggacataggagaagaaagcctctcatggactcctggagatggtcccagaatggagtctagctggtgcagtttcctgctgtaggtaaggctggactggatgagctcctgccttcttcctcctcctccatagccaagtcctgagagcttgaagccttggccccgccttgggcctcctcgcagccctctccctcaccactgccgccaccgctgctgccctgctcgcctccaccctcttccatgggctccagccccagtccatccagctctgagaagagtgggtcatcagggtgaccaggatcttgggtgctgctcccacagtccacacaggccttggtgagagaaatggacatgagagagtcagacagggttctcactgctaacctgccagcgcagcttcccacccccagcccactgtgcttcccgaaatgtactcccaagaagcaccagtccacacagatgcacctgcggtccaacaaggttggacagtgccttgtgccctctacccagatgccgttacaggacagtcacaatgcatattagcataggataggctgtgaaaagttctgcaaagactcacgcggcttaatattctataatccacagcaaatttagtggaatcaacattcttcagaattaatgatccaaggacatcaaggagatcagctcttggcctcgatcccttgaacttgagctcaattcttttttctcccccttgaacttgagctcaattcttttttctcccccttgaacttgagctcaattcttttttctccccgtcccaggcttctctcaccatcacatcaagagcccgaggcagttggcccttccggacccaggagtgcacagcacccagttcccgccgctggtcctcagaaaaccgaggctgctgcttctgcatggctcggagccgctcccgatcctgcttcagcacagaggtcatgtccctgcccaagaaggggttcagaaggcagaggctgggatccaggacccggaccaggacccatgaagctggcatccttcctctaccacagcttcccacctcatgctcctcccctaaactagtgctatgcgaggtcaaggcttccaagaccaggaaacctgctctcctcctgggaggaactagtaacagggctccaaggagcaggaagaaagatagaaacgtttatcctatccagggcagagccagccccagaaaagaaaactgcccccactactacctctgaaaggaaggccaagaaggcctctgaaatgcctcacctggagggcacctggtaggtcatcatgacgcgctggtcagcattggccatgagcagccaaatgggatcctggagcacgtacttaatcacctggtccccaggctcagccccgccccgagcagccccagcctcagcctcggaagagtcgatgctgccaaagtatttgcttgtgtggctgctctggctgctgcctgtgaagtggggggcagaccaatgggagtcaggccggctgcatgcccactcctgggacctcacaaggcctccctcaaaggccacatgtccatcccagtggccttaggaagctccgccaagacggggcctgggctcccggctccccaatcactgccctaccctgggagatgctggaggcggggtactcacgagtgatgctggctgaggtgctgcccccttcatgggagcctgaaccagacccagagcccaagccagagcccaaggagcccgaggctgcggagcctgtgccggagcgcgagtcctcttgcagcagaagttcgagcaggtcactggagccggaaagtgcgtcctgattggaggactcagtgacctccgcctggaggaggggaggggggcaaggagggatggaggggtcagcacctaggcctcccttcaactgctcttactggttgtggggagaggcacatccaaccccagtggtctctgctccccacttcgtgacagtagggccaggctgagagagaagaaagctggcgaagagtggggatgtgaggccagaccctttccaagtgacagatgctctctcagaagttattgagatgtcctcaccacctgtcagacagacaggactgtcccttcaaagaggaggtagccaatttctgcctcattcagaaattcagctggggactccctccacctcctggaggctgagacgccagcctggcagagacagcaggcagcacagggtggcagaggggcggggctggggtgggggctggcaggcagacgcaggggtcagtgctcaccagtctggcctctggctcagcagcctccgcactgggaggtgggggcccggcactgctcccagggcctcctgcaacagcagccccctcagcacgggggagctcctccagctgcagcagattgagctggagtggagagctgcatctcgagttgaacagtggagagtccgggcggtgaggaggactcggggcgagggcgggcaaggatggagaaggggagtgcgaggcaggagtgggaggcccttcagcaggggtctggagtgccccataaggatagctggatggggttgggaacagatagttagggagcaccaaggccaccattggggtcaccaaaggggcggggaaagcagctgggggcacagatgtgggagcagggggaagaggctgggggcctcctcgaggagagaacactgggagagggtagggctggacaaccgctgggaagggggtagtggctggtggggtgggccagggggtggagggtggcacgggtgaggggtgtgagacatagcagggcgcttcagcccgagggttctggtggtggcgtgagcgcttggctttggatcggcagtggtgtcggcggcttgggggtgcggggccgtggtggcagcctgtggggagagactagggttagcaaggacctcaacctggggttagtacccctgctacccacactgccctgacacgctgaccagggagaggacaggccaaggtcccagagagagcttctcaacccacacagaacgggggactcaggaggtggggcaccttcagggaagaatcacaggagccagggacaaggggatttattgagaaaggaacaaggccagggagaggttacacgaggggtcgagctgggggtgtgcggaagatggaggcatgctggcagatggaggaagcagggtgagtccatggacacatggacagatggctctggtccgccaaactcctgtgggcactgccagcctaggcattcctcctgcccatcgaggccgtattctgcctagcttgcaatggagtgaagagtggggctggaaagcccagtcctgagtcctgcgtctgcctgcaggggatctccctcaggcacctggaggggctgccttccacctgcccttgaagcccagaccccacccagagttggcccagaatctatgcatgtctcttcatcagtgacaactgactcctaagtgggcatacttcctgcccctgcccccaggctaggcctgaagtcgcttacctggagacagcacctctgcctgcccatcccagtgccatccccccaggctgccctcctctggctgcagcccggaaccccatcctagtggggagaagctagcgaggggcctgtccctaggcagggcctagtggtggaagcaacaccagcctgggtccctggagcagaaacacctcccttaagacccaccccccaacaatccagtcctagactgggcagagggcaggctccaggaggccccaggtggctacctcgctcgccaagggctgagggagctgtggaagagctgtcgagtccacgcagcctgcccaggtctcggaagcggctgaggaaggcttgctcttccttctgtgtgtgcagggacagcacggccttggtcagccccactggacggtaggcgtctggggctgggtcaggggctactgtggggctgggggctgggctgggggctgggcctggggctaggccaggcaggtcctccatcatgatgatgtctgaggagagtgagatagggaaaggtcatcagaaccacttcaggggtcaacacatccataccacaccctccctgtctgatagcctagccaacccctggcagctctgccccacagccaagcctggtctccatgtacgtttcttggtcacctctctgccaacggctggccctgggtcctcctctccatgcaaagctggcccagaagaagagacgatactcaggcccctccagtggccactccctgccaggaactctactgggatgaccccgtcacaactctcattggaagagaagcccaccccttggccttccctcacacattttcttgtttctttttttttttttttttgacatggagtctcactctttctcccaagctggagtgcagtggtgcgatctcagctcactgcaaccaccaccccctgggttcaagcgattctcctgtcccagcctcccgagtagctgggactacaggcgcgcgccaccacgcccggctaatttttgcatttttagtagatacagggtttcaccatgttgcccaggctgatctcgagctcctgatctcaggtgatcctcctacctcagcctcccaaaatgctgggattacaggcctgagccaccatgcccagcccctcatgattttcaaggtcaatatccaaagacccttcagggatgttcaattttccttgccttcagaccctgtgtggtcagcacctcagggcaaaccctctatcccagactctgtgtttcaactgacagtaacaatacgagaagcagaacaggggaagggcaaagccgagaagcctggcagggaggggagagcaagaagcagtagccccaagccccaggtcaagggaggcctccttctctccatcaggccctagaggggaggggaaaggcaggagggagctctagctgggagaccggtggagcccaagcactgccccccaattccacacccatacccgactccgggggcttcttgtctcccacatggacgatggtggagctgaagctacactgactggtgacggacaccacactctccgccttattggccagggcgagcgggctcagggtgcctcccaccactggctccttccgtggggtggccccctccccagacagcgctgctgacggcggatctgtgcagagagatggtgccagttaccatccccacccccactgggaagtcaggagagaggatcccagggaaaaggggaaggggatggtggtagggaacagagggaacagtctggagaccaggaggctggggaggagagcagggcagagcaagagggcccagaagcagaagggaaaagacacagggccaccaggccaggacggggcagtgggagcagggtgcattggatctttacctttcttggtccccacagagactggacctgtcctctgcctgtcgtcgtcagaggctgaggaggtggtataggaggaggaggaggcacatttacgcttagtggtgctggggaggttgcagctctccaggtacctggggatggacacagcacagggcatcagagcagggcttggggtgggcagggttagagcccgaggtggagaagatgcctggcaggccttacctgaggatgctgtccaggcagttgatctgctggtaggagcagctggaggcttctttcctctcggcctcctcagggaccaaggctagtggggcctggacgggagcagaacccgcctccagctctgggtctggggattggcagggaagggccttggccttgaacgtgcctgtagctggggcaaagagagaaagaggaaaatagccttctcaagctcacatggaaaaaaacagcaaatgggttgggggtgaaggtcaggggaccccccaggtctgtctcttcacccacacatcatcatcaactcaccagggaggcggggccgggactgaggccgggcccgagactcaataaaaagctgctggccctggtgcttcaccagatgcacatccttacagatctgctggaaagtcacctgtgggacacagcaccacagtgagcagaaccagggggtgtcgccagtgtcaggggccaagggcacaataaaacaagaaggtaccagtggggaggcacagacgccttgatgggagcaggacaagaaggaaaaggcaggaaggagagggcaaaggaggatcgggcaagactctgggactggcagtgctggttccaagaaggagaggggaaagggcgattagagggtgaggtaggagcaggtcactcactggcgcaggaggcccaggcccctctgcatcacccccgttgctatcactggaggacccagggctgtggagagggcctggggatgtcacggcgccgactccacagagtcccgtggggctggggctgtggacgggctgcagcagggagagggcaggttagatggcttgacccggcttcccacaccttttctcacctcccaggctccctctccgctactctcacctgcagcagcagccggtggatctgctctgacagctcctggatatcagtgtccagggagggagctgggctgggggccgggggagtgaacacgtcctcattcaggggggccctgtagagtgaagagtgaatccagccctggcccggtcctgtcccccaccgcactgccctatccccaacgccagctcgggggcatggcccacttacgtgcgtactttgtggcggcccaacacgaaggctaccttgcggctccaggggtgcacaaagccagcccagctggtgtccatggtgacatactccccgttgcgggcacagaagcggataggggagtggtcaaagggctggcccgccaactgcagaactgatggaagtgggaaaggaggagcggtcaaagggagggagagctgagtaagagggaggccatgccactagagatccaggagaccaaggcaccaagagacacaaccacaagggcagccactcaaaagcccaggacagtgggaagggcgagcagggcgagaggaactcactcttcttgtggatagccagcatgaggggtcggtcctcaggatgcaggaacaggagcactggggcccccaggaggtcctggggcaggtagcccagcaggggggcagccctgaacgggaaggaggcatcagagtggccgtggcctcagccctggctgccctcgtctcctctaggtcctatcctcacctttcatccacatcctggaagaggcagctgggtgtgtgccgcgtagtgaaaatcctcttgtcagggggtatccggggagctgaggcacagagagtgtggtcactgggtttcgtccagaatgcccaactcctcagccctccactctgcctgggcccaggctggctgatgatctgccacacagctctgccccgggcactatgggcccaaagatggtctgggccaatcctatgccctgtatcagtaacatgactgagagcaagcaaggcattcttctctgccctcctctagcttgggcaccttattcaactctacctctaagaggagctcaaatcctcatctttacaatagcttttcttgttccaaaattcaaagggtgtggttcatgcctcccaaattcatgtctggccatgaggaaatgtccttcctcccagcccccaccaggccagggccctgacctgcccaccttcgtaacccgaatggatgcgctctgcaatcagcaggcagcacggctgtgcaggggccccatctgagacccggatcttggtcacatacggggttaggcggaatggctggtaccgaggccctggatcccggtcaggacctcctctagcaaaggagagaggagcattagggactttcaacagagagccacccactcctccaacaataaggtcacagcagacaacagcaaagacgctggggagggggcaggaggaggcagaggtaggccgggcacggtggctcacgcctttaatcccagcactttgggaggccaaggcaggcggatcacctgaggtcaggagttcgagaccagcctggccaacatggtgaaaccccgtctctactgaaaatacaaaaattagctgggcgtggtggcgcatgcctgtaatcccagctacttgggaggctgaggcaggagaatcgcttgaacctgggaggcggaggttgcagtgagccgagatcgtgccaccgcagtccagcctgggtgacagagtgagactccctttcaaaaagcaaaaacaaaaacaaaaacaaaaaaaaaaggaggcagaggtcttctccagttcccctcacctacctgatacggcagaagacggacttctcctgggtaaagtccctgaggcctgaacctgggacagacaggagaggagtgagcacagcttcctgccccttccctaggctgcgaagaatccactaagggaaagtctgggttccccggcccctcacagcaggaatttcctgggactgctcatgcctccccacagcgcttgggcacctcacctgctgaggcccctgtgccccaggtgggcaggcgagatggagcagtggaaccatagaagactcccacatcctggggagccaggagctcagagaagcgggtaccccggaacacgtcccgcttgcaacgcagcaggacggctgcctgctccgaaatgtagacgattcggcccgtcaggaaggagacagccactgagaaggtatcctggcaggagggggagagcaagagcagattcaagagctgtgggagaaggagtaggggtgcgtcgggatgcagaggccaggccgccgctgacctggttctgaagtgtgtactcagacgtgatgtgctccagctcctccagggtataggtggacatgtccatggagcaaggctcgccctcctccaggctccactgctggtagtattcctggttggctgcagagtggaggcagtgaggcattcagtaaggaggctgcctcaacacgggagcccaggcccaggccattccctcttgggacacaccacttaccctgcacctgcttgacacaggccagtgcgtactgcagcgtggccagggtcccagagcggcccttgccccggcgctctggcggcagtcgaagcttgagctctcgaagtgctgtcatgagttccttctgagtccttgcccgggctgactgttcactgctgcggggcccacagggaagaaagagataaagacattagtcccagagtgtggcctgggcccccagacctctcctccagcctcacccgacgtacctgcagccactggtggacgggttgtcctgctctgagctggcactcaggaggctgtaggcaatggaactgctgggtggggatgggctctgagagtttgtgctaggagacagcaacaggcccagttacaggtagggccagcagtgcgaggcctgtcacccagctctgcctgctcacaagaccattcctagacccaacatacacatccatacacacctcttgctgctctcagtggtctccagcagggctgagtccttgccgttgcctgaggaggagctgtgtgagctccgctgagatgcgcctctagactcatgcccgttggactcattgccacttgaaccattgctgttggcatcggtgtcatcggccaggctggggcctgggcaaggccggtgctgtgggggcccaggggatgggacgcccccaggacaaaatgattccccaggcctggggtcccctcccccatcagccccttctagggggccactcatgtctgggccatggggagaacagaacagagaaggcagagaggccaccacggatgcacgagggggcctggaggcttggctgagggagtgaggtggaagatctaagtctctgagggttgagaagttcgatcacagccagtacctggagagggagaccaggaagcagggcttgcagaaagctggtttaactccagagcacctgctggcttcactcagaccttccccctgcctggcctcctgcaggactgatgggagtggaacccaggcctggggcttccaatggggagtcaggatgtctcctgtacccttagggggactgccagcgggagaaggttctccggggccttccttcacatcccctgccaccatggcctgagcagtcaatgagaaccacggctgtagacaaaaacctggacacttcccattcccaagttcccattaggtgtccactctgcctgggcctccaaggcctcggagcaggaggtgagctggtcgcctcctatatttaggcctccaggctaattttatccgggggcggtgccacccccgctgcacatgcgcgccgacgtgcgcggccccaccacgcgcttccgccgccgccacggtcgccagggaaaccgacgtcagctgctgagctcagcggttgctggagggaccacaggagggcgggaggagcgacccctcccccatttcccggcggaagtgggggaacggcccactctcacactggtgggcgcggccgggggggtcacgcatcccttacatatccccagtcccaggatggctcggtggccgtaagaagtgggacggcctattaggatcccagggttggtcctggcttccccaggacgaagcacaacggccactgccctcggcgcaaaagcccctcaacctgactctcgcctggatcccagtcattctggtcaagacaacacaacctttccttctttagcccctgcgctgcttccccaccacaaggaccgaagccggcaacctgccatcgtcaaggacccgaggatcctctctcttcagtcccctacttttctggccagacccccccaccaaccccaagccttgggcagaagacacacaacagccaacagatctttcttcccctactccccgtccaaccacacccctactactgagcattttctgagcgccaggggaaaagggaaggttgtggccaacagcaggaaccagcgctgggaacgggatgttctagtccgaagtgggctgacatcacaggcggcgcagggccagggactggagaacagagacacggggagcgctgaaagcctaatagggtcctggtaccggggcaaacctggggcccctcgagtaacgagcaagaagaccggggcatgcccgctgagagtcggctgtggggccgggaaagctgggacggggaggtggggacaagctggaggtaagatgagtgggtcaggagtgcagactcccggtgcaagatttcgaggaggacttcggtccttgggggcagggagagggtgggtagcggtaaggacgacagtgtgccctctgcctgggccgaaagtagcccatcagattggaagtggcagcggtccggctcagggacggagatcggccccaggatggccgcagagatgcctacctggtcgcaggagtgtcctccgcacgcctgcccgccgccgctccagcccgcagccgagtggaagctccaccgggcgggcggggaggcgggttgcataatgccgggcactgccccctcattggcctcttgccgacggagccgcaggccccgcccccgattggctggggatctcttcccggcgcctgattggctagtggtctccactaaggtcagggctgtgtcacacacacgggcgcacgtggacctgggtgctggtgctgggctgaagagccccagacaccgcccagccaatgggcgcaggacgcttgcacattgaataatggaagggaggagagagggagatacgctgcgcctctttagggaaaaagcccggcccggggtaggtgctcaagacttgtctacttcctgaacgcactagccttgcagaacacaacatcttggcatcttcgcctttccaagggtgaggaaaaggaatggcgctgcaagttaggccacgctggatgagatgggtggtccttgagaggaggggagagacagaaacctgcctgggcctctcctgggttcctttcccaaccttgttccctcccaaccttcgttctacataatgaagccctttaaccgaagcacttcctctgacacttcaaatcctgggagaggacagttaagggtccacgtgtgaccggtgggtgagtgggtggaggaaggatgcggacaatggaaggggcaaccagagccaatagtggctgtgaagggaaacaatggcaggtgcttctatggccactcagagacaaggtctccgggcagcctacgtggtgtctagtactttcctccagaggacgcagccacccacagttaaagctgccccaaaagtgggggccaggaagccaggactacagagggaccaaggggatggcccagagaagaggccagctggggccctagacagagaaatgtggggtggcaagggcttcatatttccactgcttggaaaagagaaagccaaactccaggggcccagacggaacgtcatctgtctcattcactgtagtctccagagcccaggacaggacctgacacatggcaagtgatcgataaacatgatttttttttttttaaacaaggataggttggggaggtgggaaaagagtgtcaacaggagaaagggggctgggaattctgattctctaaaagagatgagtagtcctagaaagagaacaggggcacgatttgcaggcaataaaatgttagtctgggctcaggagagctgcagttacacagccccctccatccaggaccgtgatgagtagttcctcgcagggctccctggaaacgtgggtagtagatgaacaggcctccaagcagctgctgacataatcattgtgggggcactcccctcactgtcacgtggcctaagctttcctgaacaatgagggaagggtgaaggggagggctctgtggaaaagctgagacaagatcgtgttataaattaacccagaaaaatcgaaacaggaaaacaaaagattcaggagcctggaggccgggcgcggtggcctgtaatcccagcactttgggaggcccaggcaggcggatcacctgaggtagcgagttcgagaccagcctgaccaacatggagaaaccccgtctctattaaaaaaaaaaaaaaagattcaggagcttggattctcagtctcctctccctgaaaatgatcctctccaccccaactcatactgtggctttggccttatctcgtttgcagatacctcttccctggaaacatggtttttctcccccttcagggatttaggtgtgatctcccctaacccaggcagtccttgatctcccgcctccatctccctgtcttttgcatagacaaaaggctccagccctccagcagcccccgcttgctcccaagactcttgttgtcctgcttcaccgtccccacagtaaccaggccctgctgccgtcaatggaggcgagggggcgggagacagcagtgacgtcaaagcggaagaagggggcggggcgaagctgcctcggaatgtggggcagggaggctggagagactggagaggcagcggtttgggaggcggccagcccgagagggcggcggccagcgcacttgggaacatcatgttctcttggctggtggcccaggacatgcacccagcctgggcgcctcccccaacaaaacgacagccgtcctgtcccaaagccagggattcctggagagaggattagtaggaagggggccccctccccacacctccccccaccacgcctggctctcttttcaggactcccatctgcccgctcctcagcttgttcctgcagctctggcttttcctctctcccaaactgtacacatctgctggcctggtaccaaagacccagggcggagaagttggaggtcctgtctctgggagagaacacgacgcacctttgctaccttccagaagccccttcagagcctgaatctcttattatgacagcgggcggggggaaagggagaggggcgcggacagggaggagaaggggcctaggatgaaaaaatcaaactgggacagagcaagtggcccagtctagggcctggatcctgggagagggctagaagggaggaatgagggaatttggactgctgcctgaagaccaaaagagccaggaagagagaaatgggacgccatcaaaacttgcagaaaaacttgagaatatgagactagttcccagccacagcattcacataaatctctcaccataacccaggcattatgctaagcactttatattatcttatttcatccccagaacaaccccgtgagataggtattattatccccattccatgggggataactaaggcacggaagttactaaacttgtccagtgcctcataacatggtctcaagctcttaacaaatggagcccaggattcaaaaatctgaactctaataatggcttgtcattctggtttcttacccttgaggaacctgtgaggtgttaaccaacctgtaagctgcattccagcactggcaaacctggcctctcaaatatccagccaattctaagtttggtgccaggaacacagactccatccaacccctttctctgccttaggcctgatccgaagccactgtttgcactccccacacacttaacatcatagcccgttttcccaggctcacaaagtgcttgagatcacccaagcagccaccagccccaatgatttcctacgaagcccacttcctcacttttctactttacctcaggccaactttaccagacgcctggcctggttgtttgtacagacagataccaaaacaccctgttggtgcctccccacctctaggggctcaggaagacgtgcacagccaatctgcccaaaccccaaccctatcctctcaggactcaatagttgctaccccacgtctattctcaaggacgactctgaggcctaaacccttccgcttaacatgagaaagacgcccggagccgtaatgtgactagctctgggtctcacaaattaaaacaccatcctttctcatatcagcatgccaaccctttggtaccctccgacttgccctaccagggcctccctccggcctccgaacctctgcctctttcaagtgtttaaggagaccacccaaacaccctgggagcaggggctccttcagtcccgacctgagagggagctccctcaggtcgcagagggcttccgagcccttccccccgggcagtcaagtgtccagggactccacgggggcgagggatctgatgtcactaactcccaccccgtccctctagacctgagttcacggtccctattctccacaaccatcagagctcccaccgcagttatcacgtatttgcatgatcccacacacacacactctaacaccttcctaaccgaccacaccaccccggaaaagtccacaccgatcgccccgcatctctcccccatccccgagcactcaccgctcggcgcgcacgcacactccaaatttcttctaggacttctagcattacactggctcctccaaacccgcccacgggccgggctgccacgccccccacgcttattggcttaggggcgccgacccatgccccgtgccgcgtgcagccgccggcccccgcacagcctccattggcacctccggccgccatcgtcttctcattggtcagcaggccaacgggggcgggagagatacacgtgagagaggggccgccccaacgcggggattggaagcctgaccggaagccacgccctcgacacttctgaggttcttattggctggggaaataacccccgacctgccaagattggtgacgtaaatgccagtcccgctctccaagctttctcataggctgagaggtcttggagctgtagggtacacgtgccggcggtctcacgcggcaacttgtttacccagaagctggggattttccttgacgacactcttaaccacggctgctaaatctgcgcaggcgcagccgtgagcggtggcagcgtataaggcgcactttgtacagagacccgggcgtgactagggcgcctctggcgctggggttccggccctgggtcccaccgaggctccctgaagctggaaggtgagagtattagggtgaagcggtcttcagatctcagcacggtgtcttggtgacgatgaaaataagagagcctcttcctgattgttttctgcgggccaggccaggcgcttctcacaaactctgaggaggccagctcacatactccccccgcctcacaaatgagaccgagatgcaggggggttacgtaatctgttcgcctgtaacacgctagtcagtaacaaggcgaaaacttgaacccaagtccccgacaccataaagcaggcgggtcctggggcccatgggaactcttaaacctggaaggaatttgagttggcagtgcgaaatcctgagcactgcctggcatatagtaagacttcaatcaagttggacattctggtaatgattgtgtacctaattataagaatcacggtggctcacgcctgtaaccccagtactttggcaggctgaggtgggtggatcacttgaggtcacgagtttgagaccagcctggccaacatggtaaaaccctgtctcttctaaaaaaaaaaaaaaaaaaaaaaaaaaacgacggccgggcgcggtggctaacgcctgtattcccagcactttgggaggctgaggcgggctgatcacgaggtcaggagatcaagaccatcctggctaacacggtgaaaccccgtctctactaaaaatacaaaaaattagccgggcgaggtggcgggcgcctgtagttccagctactgcaggagaatggcgtgaacccgggaggcgggacttgcagtgagccgagatcgcaccactgcactccagcctgggcgacagagcaagactctgtctcaaaaaaaaaaaaaaaaatccctacaaaaattagccgggcatggtggtgggtacctgtaatcccagctactcaggaggctgaggcacaaggattgcttaaacccaggaggcggaggttgcgtgagccgagattgcaccaaggcactccagcctgggtgacagagtgagactgtctcaaagcaaaaaaaggccgcgcgcggtggcgattctcctgcctcagcctcccaagtagctgggattacaggcgcatgccaccacgcctagttttttgtatttttagtagaggtgaggtttcaccatgttggcaaggctggtctcgaactcctgacctcaaatgatctgcctgcctcagcctcccaaagtgataagattacaggcgtgagccaccacactctacctaaaatatactctcatttgttcaacatcgtgttaagtggattttttttttttgagacagtctcgttctgtcacccaggctggagcacagtggggtgatctgggctcactgcaacctccacctcccaggttcaagcaattctctgcctcagcctcccgagtagctgggattacaggtgcccgccaccatccccggctaattttttgtgtgtatttttagtagagatgtggtttcactgtgttggccaggctggtcttgaactcctgacctcgtgatccgcccacctcggcctcccaaagggctgggattactggcgtgagccaccgcggccggccactcattgttgaagcacctgggaacagggatactaagatgccacatcggggcctcctggacctacaggctgtggcagttcagtgtggggtctaaagtcacaagtcatacaacagagtacaggggtagtaggccatctacaggcagctccacaacatactcagctttgtctctgtgagcctatttaaaccacaatttactaaccccatctgggcgctggcactgggttaggcacagaggggaagacatgcttcacagaaatggccaactacttcatctactgctgcacgggagccacggcagagcgtctagaagttaaatcgaggagtagaaaggagtccaacagcaggaacatgccccagtaaagggaaacgaaagctgggaaccctagaccacagggcgcaccgggcttagagacacgggctggctatgacacttcccattaccaactcctagtgcccccctgtggccactttgagaatcacactttgccctgcccaaggtcagggcctcttgcaaagtccagtccattaccaatgtatcttctcaaccttcctggtataccttccgatccaatattattcccattggttaagaaaagatcttattctcccccaaccaaaaaaaaaaaatagaaaaataaaaaagatcttagacaacacctggttactcattacacatttattgtacattttcacaatctggatgcgccacagaattgggggcatggggtgggggaagaggggggcaggggacactgggataatatggggggtctaaaacacagcacccccacctccagcatctctcctaccctttcacaccacagcttagatatccctgctccccctccacacagaaaaccagaagtgtggggggaagaaagtttgggggccccctcccgtggcaggttaagggactgtaccctcaaacccttaaaattgtgccatttaaaaagacaatagacccttcctcaatcagttcacccaatgagaggacagctctctctgggctcaatagtcctggagaggggcaagcatccccgttttccagcaagtcccatacacacattggcagtgactagtacccccaccctaaattcagggggggcagtcagaggagctgggcagtgatggggcaacaccccccaaattggggaggagggttttcagtccaacccccagcaggggtgaggccagagatttcaggcaggaattggggggattctctgccctgccccactcctccccaaggcagtgatgacccccacacacacactggtagccacccctctcacaagagatcaattgtggccaacccccaactctcctggtgggaggaggaggtggatcaggcagatgggagggaaaccccatgggaatgtcagttgagtaccccacatgaaaactggggagcaggaatgtagggagaaacccgaagtggcagaattattggtccatcataacatactgaacttcaagacacttacataccagctgggggagggagaggagggtacaagaggtttggaaaatgagggtaagggaggcaaactggactagaggggctaggaggaggcaatgctggggaccagagcagcctggttccccaaaagcccaggctccccaccacctgcgagtaatgtcgtgcaaatgaaaatgtgatacaagaactaatggggactaactcctcagtaaaaaaagaaacacaggttgagagaagagtgatggaacaaaaagaaatggaaagggatagcagtatgtaatgatacgctaattaacatgctggacgctcccaaagaccttgggattcttaggaccaagtggggccagtctcagagcctcccaatggatacaaagaagatgtacctaaggaagcctggacaggtgctgttgtttttttttttttttttttttttttgagggcggggcagagggagcatgacggggagagtgaggaggaaagaggaaaggaaggccagggtgggaggaaggatcagctaaatctgagggaagaagaaggaaaggagagggactattgcatagcagatgcaaatgaagggacttggggctagtcaggaagaaagggaaagggaaggaaggcaagagagaggggtgaagggaacctcaggaaggggtgttaaggacaaccggaaaaatcatctagtaataaaactacaaacagaccaaatatatataatattatatatgtataaataacagctggctatttacagggggacacacacacggacacacacacacacggatccaggggagtgggggctgaaagatatggctgagaggtggaggaacggctgagggttgggggagaggcccttctctaggcagggcagactcctcggggatttaagtgctgaagtaaactgtggagagaggggaagaagatgaggaagagggagaggggagagaaagagagagaacaagaaagcagtgtgtcaggcctggccctgctccaatcctccccactccccagctggctgacaccctctcttggactcagtttttccatctacaaagcaaggggctagacaggtaggttctgaggtcccttccgctccatggtatggccttgaagccacagaccctaatcctctgagcctctgagaccgcaagctctcaaataatggggtggttggcttcctggtcatgtctcaagcccctggtcctttcctttctcccactcctcaattccagggttctcagactgggctcttaggcctaaagggtcctcaatggatacaccagctttcctatttccaaatgttaacaagactgccaagaactaggcaaaatgcaggctaaataacatcaaagtttttggctctagatgaatcagaattgccattagcagctatatgtgtttttggctgaagagtaaaaactagattaatgaccttcaaaacctagaatccactggggaaacctctccagggaaagggccccggccattctcaccctactcacctatgatgatgatgaggatgatggcgcaaatcactcccaagatgatcatcatctgggggtgagaggcgaggatcagtaagacaaactatgataccccattcacccacctgtcctccttcctgtccccacccttaccttgaggtttttccaccagtatttgcgcttgagcttggctgcgcttgtttcaaactgggaggcccccgcctggagtgcatctgcacggtcgtccagctccgacagcttctggtctcgctccaggaccttgtccacgttcaccctcatgatgtccaccacctgggagaagggcccacgaggcaggggggtgtgccaaggcccacctcagtgagggcaatcctcaaacatgtgcccaccgtgccacacatggaacatgcaccctgatactgccaggttaacatgccaaggacacacagaacatgcctagcacacctggggacatgcaaggagcacacatcaggggcatgctggtgacatctcagatgtcatagcaacaccctccctctatggaacctcaggcgctctgtccatcaccagagcacacctgcccaggctggcacaccccaggctagcaaagctgattaacacccccagcgcccttccaagtgcgtgctgacagggagacagggatggggcatggtatctttgtccgcaaacccacaggcgtgaactgtcatcactcccaaaccaacatgggcccctacacctatacgccaacccccagggtccctcctactgcttttgactccccccacactcacctcatccacctgggcctgggtctgctgcagtctcctgttactggtgaggtttggagggggtgcagggggaccaccctccccagccggggcagcagggggggccgtggcagcggtagcagacctgaggagcagggacggattaagacccagggcctgcagcctcccggccccgcagccagggctccgcccatccacctgtccatcctcgtccctccagtcctccttttcgggaggaaggccacccgatgtaagccctggtctcggtccagccctgccgccgatgagctgcgtgaccttgagcgaggcccccccggcctcagtttccccgcctgtcaactgagggcgacctcacagatgcgatccgggtcgacccgaaaagacaggcggccgcggtgacaggggcggggaggggcaggaggacactgggtccgctccttcccgcggccatcgcccgagccggccagcccgggacgcggggctcctcggccgcccgcgcgcagtcaccggcttgggcctggccccggggcgcggggaacgcaggagagaccccgggcactcccgacggccggttgccaagggcggcggccggcgcagggaagcgcggtgagggtggcgggcggccgactcacatggcgggggcagcgggtggaggacttggcagcggcagtgatggcggcggcggctcgcgctggctccgactggcgctggctgcccgggacggaaagatggcggccgcgcgtcacccgcatccgggcactgcgggcgggggcggggcgccgcgggagacgcgtcgcgagcggggccgcgggggcggggcgctgcggggcgctgcggggcgggggtcgtgccgggcaggaccacgggccccgcgccaccatgccccggcagctccctcggcactcgcgggaccccaaggcgggctgctgcggcttccccaaacccaccgccaccccaccctgtctgaccacagcccccccaaaccgcctgccgcctgccccttagagcacaacgcagcctggccctacacctaacccccagaccactccctcaatcgtgaacccagtaaaccagcctgcaccccacacagcccaaggtcttgccccgcgcccaggtcccagcacctagcgacccgccttcagcacttggaatgggctggagttgggaaatcagagagggccagtgcaggtgctggggcagtatcgagagcggggaccttactgctagggtggagaggagtgggggagattggtcccaacccatcaccgctggtggatgtctcagaggaagcctggggtccctggccactgggtaggagggtaggaagaaaagatgaggcaggctcttcccgcccaaacaagtccagggggcggaggacgggggagtgtctacagggtgtggggagggggctgccccgcctcacgattaaggttcagactaggggtacttaaccgctggagcaggcccgactgaggtggggtgagctgaggaccccgaggaggagggcacaaggctgccgggggtgatgggggcaggggctgcttcacgtggtggctgctgactggccaagacctagctttgccccaggcttaggtcagcgacccgactgcaggaaagggctcaggctttggtcccaggcacagggcctgggccaaaaaaaaaaaaaaagccttttttctttttctctcatttttttttctttagtagtaggcacagtgggcacaggttacaaggtgctgctttacatgcgtattcgcctcgcaggtgtgaccttggaccgttgccctcctctctctggaccccaaatacattgcatatgtaggtactaaatccatatttgttaaatggcttgatgtggataacataggagattatccctggctggtctccattaggccctctaagcacacccagcagctgtatacactcccacccagcttgtcagagaagatgggaccaggggagctgtcgctctggtggagtgcagggggtcaaagcaagcctcaagggtgcaggaggcattttaggcgaggccctttggccctggggtgggggtgcttactacatccctggaaggtgcagggaggctgatggccttgatctctaagacaaacaggaaccagcttcctccctcccccaccctggcttcccagggcctccgggtgtgagatcctcccccactgcagtgccccacccgctccccacagaagcccggagagtggctctgtcaccagaggtgtcatttcccagctgtctgtgggaggtgagtgagcagggaatgtgtgtgctgggtgtgggaactcagcccaatctaagagaagatactcttggcttcctccccctcagaggagcagccgcgtccctggtccttgtgcactgacagtcccgggtggctcagcctatgtgatgagaaagaaaagagcagcttccacgggggtctcagatcatgctgtgagatgctggctcctgctttttggtcttcaaatgattcctctttctagtcagagaacaaagatgccaaattccagccttttaagttcaaaaccctcagtgtctgtcagggtataaataagacatggaggattggaagaggcaggcacaggaagcccttccgcccccagttggacaccctgcactaactgaggggagcctagtgcagagccagacaagacatttgatgctggtttgggggtgatgtggaagggacagagccccagatacacggtcaaggccaggggtcgtgctattgctattggatcgtggggacggcagcagcagagtagaaatgagggcatgtgtgacccacggagatgaagggcccaggaggattcatctcagaaagaggactctcatccagcagccccttcccaccccaccccacctaggctgtggctcagaggaactccccaaatttagatcaatggtggaggtgggagaaggagtgggatgacggagttcacctggaagtgactgagagaatgttttctgcaggcaggtagaatggagacccaaatagaggtaagttgaacaatagaaaaataatgtatttgcataactcagatttggcttctacatgtactggcttcgggaattggccaatgattttctagggcacacccccaagactcattcaaaggatgtaggactcaaggtgatggtgatgtaggcaacagagaccacactttctttttcttttttttttctttttttttcttttttgagacagagtctctgtctgtcacccaggctggagtgcaatggcgcgatctctgctcactgcaaactccgcctcccaggttcacgccattctcctccctcagcctcccgagtagctgggactacaggcgcccaccacccggcccggctaattttttgtatttttagtagagacagggtttcaccgtgttagccagggtggtcttgatctcctgaccccgtgatccgcccgccttggccttccgaagtgctgagattacaggcttgagccaccgcgcctggccgagaccacactttcataaacgctttcttttattttttatttttattattatttatttatttatatttaagatggagtttcgctcttcttgcccaggctggagtgcaatggtgcgatctcggctcactgcaacctccacctcccgggttcaagtgattctcctgcctcagactcccaagtggctgggattacaggagtgcaccaccacgcccggctaatcgttttgtacttttagtagagacgggatttcaccatgttggccaggctggtctcgaactcctgacctcaggtgacccacccaccgtggcctcccaaagtgctgggattacaggcgtgagccaccatgcccggccttatttcgtaatttttttttctcttcagacaattactggtttagaagtcggccggggctgcagtgcagtggcgtgatctcggctcactgcaacctctgcctcctgggttcaagagattctcctgcctcaggctcccgagtccctgggattacaggcgtccgccaccatgcctggctaatttttctatttttagtaaagacagggttgcgccatgttggccaggctggtctcaaactcctgacttcaggtgatctgcccactttggcctcccgaagttctgggattacaggtgtgagccactgtgcccggcctttttaattattttttttgaggcagtctccctctgtcacccaagctggagtgcagtggcacaagcttggctcactacaacctctgctaatttttctgtttttagtagagacagggttacgccatgttggccaggctggtctcaaactcctgacttcaggtgatctgccgaccttggcctcctgaagtgttgggattacaggcgtgagccaatgcacccggtcaagaaggtgtctctttttgtattaaagcataatgtaaacacataaagtggtatctttttaatatgtgaagttctctctgaacaagtaccaagcacagtgccaggaacgaggcaggcaaatgaataataaactatggtgagtgcatagcaggcagacagactgctaacgggaaggatgtgtttgggcaggacctttgtgcccagtattctgtaaggacagtcctagttgggctggcgaagcactgatcactttttactggttcgaccagggaaccagccagcagagcaggcccaggcccctggccactgggaagcagggcagtgtgggtggtgggggtgccacatgccagagccctgtatgggtgggagaagacataggcagatcagaatctcctgggattgggtgcgtgaaaggactcctggttccggtccctcactctccaaccctccattcattagagattcactgggtttaacaagctcctgttgttttgaaagggggaggaattctcctctagatagagaggttgtcaagaacccacatcttcctttttatttatttatttaattatttttgagacggagtctcactgtcccccaggctggagtgcagtggtgccatcttctgcctcctgggttcaaacaattctcctgcctcagcctcctgagtagctgggattacaggcgcctgccattaagcccagctgatttttgtatttttagtagagacagggtttcaccatgttgggcaggctggtctcggactcctgacctcaggtgatccacctgcctcggcctcccaaagtgctgggattacaggcatgagccacggcacctggttgacatcttattaccttccatattacatgccaagcccagagcctggcaggtagcaggtgttcaataaacatttgtttaattgagtcaactgatttggcctaacagccaggagacttgggttctagtcccagctttcccactctgcatggtgtcctggagcaaatgcctttctcctggggcctcatttttctcatttgttaagtgagggctctctcattctacaatgccaggcattgtgctggtatcagaagctacaataataaacacaaagagagattattaaaacagcatgatctttgctgtgatggacttaatgaccaagacacttgccaaccctcctcaaacggattaaaccgaaaaagaagaatcttgtaactagaacacagctagaaacagcaggatccaggtcctcaaaagttgccatcggggatctgtctctctgttcttcagctatgcttgcctctggcgtagcttcatttccacacaggcaacataagcagctgcaggctcacatttgtttaaaatgttatagttttatatatatttatatctagtttatagagatggggggggtctcaccatgttttccagactggtctcaaacttttggcctcaagtgatcctccggccttagccccgcaaagtgctgggattacaggtgtgagctaccatgcccggccccaaaaatgttatagtttttaaatttttatttgttttttcagagacatggtctcactctgtcacccaggagggagtgcagtggcacaatcaaagctcactgcagcctcgaactgctgggctcaagtgatcctcccaccttagcctcccaagtagctgggaccacaggcggagaccaccacatccacatccagctaatttttaaaattttttgtagagatgggggtctcattatgttgcctaggctggtctcacactcctgggctcaaacagtcctcctgccttggcctcccaaagttctgggattacaagtgtgagccactgcactcaaccttgtatattaaacacacacacatgcacacacacacacacacacaatttatcttcagaatttcaaaagttcaaaagagcatatgcagaaagtttctcccccaccctgtatcccagccactcaatctgctttctcacaacagccaatactcccggttgcctgcacctcctttcagaggtggtccatgcatatgtaagcaatcatgtttgtagttttccccttttttacaccaatggaagcaaactacatgcacttttctgcaccttgcttttgtcacttaatgtatcttgtatattgtaccattatactgcataaaattccctttcttctggtggcatagtattccacagtatgcatgtatcagaatgtaaccaatcccctactgacagacatttaggttgtttctagccttttgccaatacaaacaaaggtgcaaagaatatcctacacattcccctttcaactgtgtgcaaatatgtagggctaattcttagatatgaaaatactagtcaggtgtggtggctcacacctgtattcccagctacttgggaggctgcagtgggaggctcactttagcctaggatttccaaggcttcagtgagccatgatcatgtcactgcactccaacctgggcaacagagtgagaccctgtctcaaaaacaataaaaataacaaaaataaattctaggtcaaaggaataggtgtttgtgattttgattttcatgggaattgctaaattgctctccatagatgtgttaccaacttttactcctaccaacaaataggcaacgcctgtttgcccacaccccctccaacactctatgaaactttttggtgattacaaatatgctaagttgaaacatgatctgcatttctcattgatgaatgaggttaggcatcttttcatatagttgagagttttttgtatttccttaccagtgaaatttctgtagaaatgttttgtacagttttattgggttattggtatttatcttgtaaatttgtagatatatatatatgtcaaaattagtcctttctctgcaatatgaatttaaaatattccccctagattatcatctattctttaacttttgcttataattttttgtactatgcatagttttaacattctaatatatatttaaagtgtgtgagtgttttcatttatgccttcagtgttttattaccatactttgagacttcgagaccagcctgggcaacaaagcgagaccccgtcactacaaaaaagttaaaaaattagctgggtgtgtttttacccgcctgtggtcccagctactccggaggcagaggtgggaggattgtttgaacccagaaggtcaaggctgcagtaagctgtgaaggcaacactgcactccaacctgggtgacagagtaagactctgcctcaaaacaaaacgaaaaaagccatcaaaattagccagtagtggcagtaggtgcttgtaatcccagctactagggaggctgaggtgggaggatcacttgagcctggggcagctgaggctgcagtgagctatgatcatgccgctgcactcctgcctgagccacagggcaagaccctgtctcaaaaataataataatagggctaagcacggtggctcacatctgtaatcccagcactttgggagactgaggtgggcagatcacctgaggtcaggagttcgagaccagcctggccaacatggtgaacctcccccccaacccctgtctcttctacaaatacaaaaattagccaggtgtggtggcacgtacttgtaatcccagctacttgggtggctgaggcaggataatcacttgaacctgggacgcggaggttgcagtgagccgagatcgcgccattgcacttcagccagggcgacagaaggcgactccatctcaaaaaaaaaaaaaaaaaaaaaaaaaagaggggaggggaggggagatcagccgggcgtggcagcatatgtctgtagtcccagctacttgggaggctaaggcaggggaatcgcttgaacacgggaggcggaggttgcagtgagtcgagatcgcaccactgcgctccagcctggcgacagagcgagactccgtctcaaaaagaaaaaaaaaattaagttattcaaaatataaggttaaaagttccaagatttatttgaatacttttatgcttttgtttttgttttttttttaagacagagactccctctgtcacccaggctgaagggcagtggcgcgatctcagctcactgcaacctccgtctcccgggttcaagcgattctcctgcctcagcctctcgagtagctacgattataggcagacgccaccacggccgactaatttttgtatttttagtagagacggggtttcaccatgctggctaggctgttcttgaactcctgacctcaggtgatctgcccacctcggcctcccaaagtgctgagattaaaggcgtgagccaccgcgcccaggctaattattttattttatagcatgcttttatttccaggaagagtccaggcttctcttttcccaaaagttccagcaatagtcctgttgtcaaggtttatgcttgaaccaatcaccgcgcccaggaaaacagaatgagcctagagaggaatggtagggagggagtggctgtcagcctcttcctaaccacgcagactaagaataagggagggtctcccaaaagaaaatggtggtgctgccgggcgcagtgcctcacgcctgtaatcccagcactttgggaggccgaggctggcagatcacgaggtcaggagatcgagaccagcctgaacaacatggtgaaacctcgtctctactaaaaatacaaaaattagccgggcgtggtggcgcgcgcctgtgatcccagctactcaagaggctgaggcaggagaatcgcttgaacccgagaggccgaggttgcagtgagccgagattgcgccatcgcactccagcctgggcgacagagcgagactccctctcaaaaaaaaaaaaaaagaaagaaagaaagaaagaaaaagaagagaaaatggtggtgctattaccagaaagaaaggatggatactgaactggcaaaaacagatgtctactatgatgggagaatcccaagacccagtcaactcagggaaaagacactgagcagttaccacaggcctgacactctgctacccttctcccctgacagacagcagtggccggcgcctgtaatcccagctactcgggaggctgaggcaggagaatcgcttgaaccagggaggcggaggttgcagatcgcgccactgcaccctagcctgggcgacagagcaagactccatctcaaaaaaaaaaaaaaaaagtgtgagtgtggatgagggaactgaggcagaaagagggaaagtgacctcctgcccatcacacggccaaaaagagaaaaaaccacactgggaccccggcaggcagtctggctacagagcttgttcctgtagtcctggccctgggctagggctcacatacgtgagctgagatctggaaaccagcagcatctagttgatgtttgaaaacaagagatgggccgggcgcggtggctcacgcctgtaatcccagcactttgggaggccgaggcgggtggatcacgaggtcaggagatcgagaccatcctggctaacacggtgaaaccccgtctctactaaaaatacaaaaaattagccgggcgtggtagcaggcgcctgtagtcccagctactcgggaggctgaggcaggagaatgccgtgaacccgggaggcggagcttgcagtgagccgagatcgcgccactgcactccagcctgggcaacagagcgagactccgtctcaaaaaaaaaaaaaaaaaagaaaagaaaagaaaacaagagatggatgaagtcacccgaagagcagtgatcaccagcacttacggggcaagcagaagagacaacccagtattatgtccccagtaactgacacactgcaggtactcaataagtatttattgaattaatgtaagaaggaacaaccagaacagtataatagtaggcaaaccaggtgaaccactgtttcaaaactaagggagaaaaaagtgcaaaagaggggagtgggagaaacgcggtggctcatgcctgtatcctagcactttaggaggcctagaggcctagtggggaggacggcttgagcccaggagtttgggaccagcttgggcaacacagtgagaccctgtctctatagaaaaattttaaaacaaccaggtgtggtggtgctcacctgtagtcccagctacttgggaggctgatgcaggaggatcatctgagcctgggagtttgaggctgcagtgagccatgatcccaccactgcacactgcactctagcctgggcaacagagtgagactgtctcaaaaaaaaaaaaaaaaaaaaccaaaagaggggggtggtcaacataccatatgctgaagagaggtcaatctcaagtctgaaaagtgactctggatttgggaagaagtcattggtgatgatgagtttcttgggggtgtactggtagatttttaacaaccaactctccaaaaacaaatgtatccatgtatatacatctgcgccgtgcactcctgccttggcgacagaccaagaccctacctcaaggaaaaagaaatacagttcctattgaataccatcctgagggcaaccaccatgtgcacaagactgcagatatttactgatgtgcaatgtttcctgagaagtgaggattaaagttatcaaacgacaaaaaacaaagagcccatttgtattatttcactgcctaaattccagaaagcaacaaaaaccaaatcacaattttcaagaacaaacaaatttagcaagactgcaaaatagacaaacagcaatagcaagactgcaaaatagacaaacagcaaggttatcccagtcagaacttcatagctatgtttgtggatatctgctaatcagcataacacaaatgtaagtgatcgtcagaaagaatcagacaggagcaatcagggtgttgcaagtcctgattacgcagagacgttaatcacgtttcatgcatctccaatcatcatgttctaatctgccctccggaggaggaacaggtaaggattatcccacctgacgatacagacaaacagccgacattctgcactcagtgaaaaagattccgttacaagctagggtgagttcataacgcgctggtatgagcaatcctattatttagcgtccttccagttgttttgccatattagctcgcacatttttttaaatttttttttcattcggctgccgaaaaggaataaattacttcttcccagaatgctccgatcagttacgtgccggacgttctaactgtacgcactttctatttacatatctccgcccactcccttccgccaggcacctaccgtagtaaccaaaatagaagcgataccaagtatcttacggtctgcaggactagaaaacagcgttgttttttttttattcagtagttcagccatctcaattgtcccctaaaactgtatataagtcttaatgttactacaaaacatattttattacaaagcactaaatacaatgcggataatcccagactcaagacgtaattattccaacacatatcctccagcagaagcagtttccgaggggaaaaccgaagcctatgccttccttcttccaggaatacgaagcggcccttgcccctgtaggcttcgtccttaggttcccgtcatgaaggtaatcagaagggtttctttttcagcccaaagacggtgacgaataaagccatttcagtgacagctggaagggcactaccaaggcaagtggtagattcagaaaccctttcagtataaatacccaaatctccaaaccagagaccccacctctgaaagtgtagggcaggtggcatggggggtaggggatgaaactttaaaagcctacaggatgttgagtggatctggtatctcacacatggaggaaagggctgggtaggggaaaaaccttcaggtttagggccaaccttcctccctcatccccaaatattggatgctaccacacctgcagaagacaaaaatgtaccaatacgtagtgcactcccaacgctcgaatatgaagaaggacagggccacggatgcactacagtgagccccaatggcttgggaaggcacgagattaaggaaagtctttggatcgacagacagtgatgggtcagaaaaggccagtggtggggctggcatctgcattcaggttcatcccttgctccctcaccatgtttcaagggctagagtcagcagctctgacttctgaattttaggacagtcatgtgaggagagaccagaagtgactgcacagatcggacctcaggctaccctaccccttatctgtgggccagcctggatccttcagatgagaggtaagagtaggctctccttctgctatgccacaaaggagtgctgacagcgacttaatatgcgctggaatcagcctccagtgtcctggtcctcctggtccacaattctctgacccatgtgcctcatctcctttgcctcttctgagttcccagtgctcgcttccgttgcctcttctgagttcccattgtgctttatatcttttgtttgttttttgacagagtcttgctctgttgccctggctggagtgcagtggcacgatctcagctcactgcaacctctgcctcccgggttcaagcaattctccttcctcagtctcctgagtagctgggattacaggagtgcgccgccacgcccgactaatttttgtatttttagtagagacgggggtttcaccatgttggtcaggccggtctcgaactcctgacctcaggtggtccacctgcctcggcctcccaaagtgctgggattacatgcgtgagccatcgcgccctgcctgtgctttctatcttcacacacttctatagcacagtgcttatcacactgaattacagatttgtatctacctcctcctcattgtaaaaagaaacggtggggtttttattattcctattatttttgtagacttgggttctcactatgttgcctcctgcctgcgcctcccacagtgctgggattacagacgtgagccaacatgcctggccaaaaactgtattttactctcattttgggattttaagtgcctagtaaacagcaggatttagcacatcgttgaagatctttgaactggaaggattggctacagcagacactattgtgtcaggtggctgaagggagtcctgatagaagtgggtcgtgtgggaaaggtgggcaggcagaaaggatacagatgaggctctgggtgctgttgaacatggagactcctgagaggaaaccggccagctccactgcaaagaggcccagggtgacagagagcgcggccaccagcctgcagagaggaagtggactggcccaggcctttggacttattctaagacccctccactcccaccacctcttcgttctggccaccccgtcccaagagctcactgaatgtcctgcttgtcatactcctcgggggtgaacgtgagaggcaggcaggcctgtatgttgctgtcctgggagcagggcacaggaagagaagtgaaaaaggggcaggctgcagggcaggcctgggggcggcgggaaacaagaaaacccaagagggtaagacactgggagggggcagggtaggactaggaccactcagagatgggaatggggacggattgagtgcagccgtgggtcttacccgggaccagaataaggtgatgacgaccaccagatgcgccaggagcgtcaggaagcgagagggcacaagccctgagacccggcccatggccctcggggacaagggcggcggtctctgaggctggaagttcagagacagcgactcctgaagtctccccgcaagccgacaaatctagacgaacgcctccttcccgcccgctcaggcaccgcccagttgccttggtaaccgtgtacgcgggctcggcgccgcgttctcggaaatcctcgcgagcagtacattctccggctgctgcgggtctctcagggccagcgaaggtcaggggtacccgaaggcgcttctaacctaacggctgggtacccgcgcgcagccaggccctttgttcctcagagggtgcgaggtggcacagccccgcagcgcccgatctgcccacgcagggcggatgaacggaaacccaccctggcctagcttggggacaccaatgcttctgctgttgcccacgccgggagcggcccccagccccagctacgctgcccagttgtggatcacttgagaccgctgccaccaccacgccgggctgagttccccgccatgccgaagactcagacccgctccccttcccctcctctgcatgcctttagcttcccaccaagctgggcctgagaaacaagggacccgaacctggagaggccggtgttcctggactgctctgcagtcacagattgtcacggagcccctggttgtctgaggaccccaggcctgaaccttccttgaggaagactgatttctttcagactactttgctcagtttggtgagggatttgcagagtgcaaaaaatggccagcgtccttaaactagcatggggataagagcagagcaaggtggctggaaagagtgggagtggacgaagggaatgggacagtccctgcgtctctgggaggcttggagccggctggaagggaaactcaactcagatttctttgtcccttggaggtgctgggcctccgacattgcccagctacagtccaagaagctcttatcatcggcgacctcatgacctttgggcctcagcgcaggtccctgcagatctgaaagttctttaattgctgagtcaagtcccatcctcaaggaacctcccggcccatctcccaggagaacaatctcttcctactccccactccccatctcagtgcttttagccagcctaaactacaagcccaagaggcatttctcattccttcaacaaatatttgtatatgtttattgattacctagtaagggtattctagtcagggagatcaacaacagacatgcaaacaaataaatccgtaagataataggcgctacaaacagggaaaagcgggctgtgcactgtggctcacacctgtaatcccagcgctttaggaggcctaggagggcggatcacctgaggtcaggagctcgagaccagactgaccaacatgctgaaaccctgtctccactaaaaatacaaaattagccgggcgtggtggcgcgtgcctgtaatcccagctattcgggaggctgaggcatgggaatcgcttgaacccaggaggtggaggttgcagtgagccgagatcgcgccattgcactccagcctctgcaacaagagcgcaactccgtctccaaaaaaaaaagaaacgctagaattataattctataaaaatagggcatttataattctattaaaatagagcatttattttgttttattttatttatttactttttctgagacggagtctcgctctgtctcccaggctggagtgcagtggcgcaatttcggctcactgcaagctcggcctcccgggttcacgccattctcccgtctcagcctcctgagtagctgggactacaggcgctcgccaccatgcccggctaattttttgtgtttttaggagagacggagtttcactgtgttagccaggatggtctcgatctcctgccctcgtgatccgccagcctcggccttgcaaagtgctgggattacaggcatgagccaccgcgcccagccggacatttaaccttaaactttattttagaaactttggccaaaaattggccgggagcggtggctcaggcatgtaatcccagcactttgggagaccgaggcagggagatcacctgaggtcaggagtttcagaccggcctggccaacatggtgaaacctcatctctactgaaaaaaaaaaaaaaaaaaaagttaaaaagttagccaggtgtggtggcgcccgcctctaatcccagctattccagaggctgagggaggagaagtgcttgaacccgggaggcagaggttgcagtgatccaagatcgtgccactgcactcccgcctgggaaacagaccaagacttcgtctcaaaaaaaaagaaaagaaataaaaagaaaatgcactctgggaccagaagcaaaagcccatgcctgtaatcccagcactttgggaggccaaggcgaagtattccttgaacccaagactttgaagccagtctgagcaacatagtgagacacctctctctgttaaaacaataataaaggccgggaatggtggcttacgcttgtaatcccagaactttgggaggccgaagcgggcggatcccctgaggtcaggagtttgagaccagcctgacaaacatgatgaaaccccgtctctatttaaaaatacaaaaaaaaaaaaaaaaaaaaaaattagccgggcatggtggcacacacctgtattcccagctactcgggaggctggggcaggagaatcgcttgaacccgggaggcggatgttacaatgagccgagattgcgccactgcactccagcctggacaacagagcaagactccaactcaaaaaaaaaaaaaaaaaaaatatatatatatatatatatatatacacacacacacacatatatacatacatagatatctttttaataaagttttaggccgggcgcggtggctcacgcctgtaatcccagcactttgggaagccgaggcgggtggatcatctgaggtcaggagttcaaggccagcctggccaacatggagaaaccccgtctctactaaaaatacaaaaattagccaggcatcgtggcacgctcctgtagtcccagctactcgggaggctgaggcaggagaatctcttgaacccacgaggtggagattgcagtgagctgagatcacaccactgcactccactctgggtgacagaatgagattccgtcttaaaaaaaaagttttaaacaataaacattaatgttttcggagtcttatattgtattattaagacaagaaattggaaaaaaaatggaatgatttataggattgagggtccctaaaatgttgaactcctatatattgaaactatgtaatgacattttcatataaaccatctctttaaaagacagcacagccttttcttcatattggagacaatgtaatcaccaaaacttgcttttatccccatgaaataaaagcttgtgattttctaaactttactgaggagttactattattattattattatttttttaaaggaggttcaacaaagtctctctttgttttttttaggcagggtcttgctctgtcactcaggatggagtgcaggggtatgatcatgactacagtgaccctcgacctccctggctcaggtgatcctgctgtctcagcctccggaatagctgggactacagacgcacgccaccatgcccagctaatttttgtatttttaatagagaccgcgtttcaccgtgttggccaggatggtctccatctcttgacctcgtgatctgcccgcctcagtctcccggcacccaaagtgttgggattacaggcgtgagccaccgtacccggcacccccctcccttttttttttttttttttttttttgagacagagttttcacctttgtcgcccaggctggagtgcaatggcataatctcggctcactgcaactgccgccttgtgggttggggtgatgctcctgcctcagcctccctagtagctgagattacaggtacccgcgaccatgcccagctaatttttgtatttttagtagagacggggtttcaccatgttggcccggctgttctcgaacttctgactcctgacttcaggtgatccacccgcctcggcctcccaaagcgctgggattacaggcgtgagccgccacgcccggccagttcttttcttaactgttggaccccttcaaagttctgaagatagtttcaaacctccctgctctcaggatggacaaggaaacccattaagttttctcctttgaaatgacccccattgcatttgattcctaaaatgagtgatagtaatgacacctaatttacaatgagagatgagcttcctgtattctccaatgcagaaattacagcatagcaagcattcaaacgttcttaggagacaagataaaaagactgaaggttcagcctgggcgacatggcaaaaccccgtctctacaaaacaatacaaaaaattagccaaacatagtggtgcacacctgtagttccagctgcttgggaggctgaggtgggaggttcacctgcacccaggaagtggaggctgcagtgagccatgatcacaccactgcactgcagcctgagtgccaggagtgagacctgtctcaaaaaaaaaaaaaaaaaaaaaaaaagactgacgaactctccatgcttttcttccctctgtctgcaacttacatgcattttcgacctagaccttcagaggtgagctcccccagtgagagattcatcaaatataactgttcacagatgaaagaagttgtcataggccaaaagtgaggaaaatccaggacctgcttttgcaaggttttccaaggtctctgaatagaaggaagtgaaagagtcagctacatgaacatctagggaaagagcattccagacagaggacatagcaagtgcaaagatggtgagaacaagccaagtgtgtttgttgaacagtaaggaaggcagcatttcagaaacctagtgatggaaggggaagaaaagttcagtgtgaggttcgttaggtaaacaggggccagatgaagccaggccttgcagctacagggagggacatggtcaggttggtgttctagatgatgactctagttgcaacatggataatggattttaagcaaattttatttttatttatattcttcttccattttttttctttcttttaagcagattttaaacagaaggctaataattatccagaagagacaggatgaggcttggacaaaggaggtggagggtatcaaaagatatttagaagataaaggaagtctggacttggtgctgtgggtgagtgggaaaaagggagggtcaggatggctgttagattatgggggctctgacagctggaggtctggggcattctgcttataataggccttctgggccaggcgcagtggctcacgcctgtaatcccagcactttgggagaccgaggcaggcagatcatgaggtcaagagattgagaccatcctggccaaaatggtgaaaccccatctctactaaaaatacaaaaattacccaggcatggtggtgtgcacctgtagtcccagctacttgggaggctgagccaggagaatcgcttgaacctgggaggcggaggttgcagtgagccgagatcgagccactgcactccaacctggcgacagagcgagactccgtctcaaaaaaaaaaaaaaaaaaaataggccttctgcataggggacttactatataagtaacaacggggtagtcacatttcatgtcctgaactgataaacagtgagtagcctttcctgtcattttccatgaccttggttcacagaagcctgccctatagagacgctatttctgcctgctcacaaaaccgatatttagagccagccagtggccataggaggtactgctggtgatgaggtgtccccccaagtgactactcactccaggactgggacccacaagtactaagatttgaactcttaataaaaggagttaaaaatcgtttttttatcatggacaaattcaaacatgacaaaataaagaaaatagccgggtgcggtggctcatgcctgtaatcccagcactttgggaggccgaggtgggcagatcacgaggtcaggagttcgagaccctggccaacatggtgaaacccagtcactactaaaaatacaaatattagctgcatggtggcaggtgcctgtaatcccagctaatcgggaggctgaggcagcagaatcatttgaacctgagaggtggaggttgcagtgagctgagatcgtgccattgcactgcaacctgggtgacagggcaagactccttcaaaaagaggggaggggaggggagggggaaaggtgagggagtggggagagggaaggatgggggagccgaggggaggggagataatgaacacttctattctgcttcaacaattatcaacacatggccaactttgtttcaggtataccctccctcatggcacacaccaggttattttgaagcaaatcctagacgtcatcaaacagttcaaattgcccaagtgtctcctacacacttcttttttcttttacagtttgtttgaatctgggtccaaataaagtccacacattgcacctggttgtcatgtctcgctcatcttgggtcctgcctcctctctaccccctcacctcctttctccttcttttcttttcttgcaatttatcagttgaaggcattgagccatttctgggccttattcttgtgatgtgatttaacatgttcctccatgccctgcatgtcctgtaaactggttcttagatccagtggttggttagtctcacgttcagttttctggtaaaaacacatcatgagtgacggtttgttctcctgattccattgcatcaggacgcctgcttttccctgtttttctagtgtttaggctgagcattgggttcaggtgtagtcagactaggcaacaattataaaattccccgtccgtttttcacctaatggtttagttgatcatcactgcctagctctattatttcattaggagttgcaaaattgggatgtcctaattctgtcattctgcagtaagaacttgccatcatcaatttgtttaccatgagatacaggtcatacaggaaaggcaggataaatgtgtgggttttttcttatgatttaccagttttcagaaaaatgagttggttctctagcatcttgaaaaagtaattagttgtttttaatatcattatgaacttgtacattttaacatcttttgtgtatttcaatccattgcagttattctttttgatgttcaaattgtcccaattttggtcggtgggagcttcttctggttggtgcctaagcttgctttctttctttttttttgagacggagtttcgctcttgttgcccaggctggagtgcaatggcgcgatctcggctcaccgcaacctccgcctcccgagttcaagagattctcctgcctcagcctcccgagtagctggaattacaggcatgcgccaccacacccggctaattttgtatgtttagtagaaacagggtttctacatgttggtcaggctggtctagaactcccgacgtcaggtgatccacccgcctcggcctcccaaagtgctgggattacaggcgtgagccaccatgcccggctccgtctcctcctcctcctcctcttcttccagacagagccagactccatctcaaaaaaaaaaaaaaaaaaaagaaaaagacgattatctgactattcgggtggcagggagattagagaggagcctgctacaacaatccagcaagagaggctgaggggttgtcagtgggatggggaaggatggttgacagggggattattgaggaaatggaattgacaggatgtggtgactggaagtaagacggtagggggagggaagaatcaaggatgcatcccccagcctgggcctggccactctctgggagtgcagaaagactggaaggaagtatggcagggtcaagtgaaggtatcagcaggcactacacatctgagtccagaggtgggagcgagattcaggagcccttagcaagcaggaaatagctgaatccgtagaacatgtgtagcatgaggagagaaaacctcacccgaggaaaaccaggatttacagggagaacagaaaaagagattggagctgggcgcggtggctcacgcctgtaatcccagccctttgggagctcgaggcgggtggatcatctgaggtcagcaattcgagaccagcctctccaacatggtgaatcccggtctctactttaaaaaaaaaaaattaaattaaccggcaccacgcctgtaatcccagctactcgggaggttgaggaaggaaaatcgcttgaacccgggaggcagaggttgcggcgagcgagaacgcgccacacagcactccagcctgggcgacagagtgagactccgtttcaaaaaaatttataaaagaaaaaagaaaaagagactggagcggggagccagttaggaagggccagcagactagtgtcaagacaaccatgggaaatgaggctcatggagaagatgttgcctggagtcggttaaggccaggcctgagaaagcctgttggctttgacatctctgtggtccctgataactttcgagagagccactgtgtagaaatttggcttggatggaaaggaatgagatacaggcaggacctcttgtgccatctcggcctattgaactcctttcattcttctagaaacagccgggcgcggtggttcacgcctgtaatcccagcactttgcggggccgaggagggcggatcacgagatcaggagttgaagaccagcctggccaacatggtgaaaccctgtcaccaccaaaaatacaaaaattatagctgggcgcggtggtgggcgctgtaatcccagctactcgggaggctgaggcagacttgcttgaatccgggaggcggaggttgcagtgagccaaggtcgcgccgccgcactccagcctggacgacagagtgagactccgtctcaaaaaaacaaaacaaaacaaaacaaaacaaaaacagaaaaacaacaacaaaaaacttatgttggccgggcatggtggctcacgcctgtaatcccagcactttgggaggccgaggcgggcggatcacctgacgtcgggagttcgagaccagcctgaccaacatgtagaaaccctgtttctactaaacatacaaaattagccgggcatggtggcgcatgcctgtaatcccagctactcgggaggctgaggcaggagaatctcttgaactcgggaggcggaggttgcggtgagccgagatcgcgccattgcactccagcctgggcaacaagagcgaaactccgtctcaaaaaaaaaaaaaaaaaaaaaaaaaaaaaagaaatactgatgtttgtggtggttaaaattagaacagagattgcctctggcaagggaggagtggggatccgtagagaagggacagacatgcaagaaccttgagagagggaaatgtcctatatgcttttaaagagttgtgatttgcgcaggtgtatgtatttgtcaaaactcatcaaaatatagacaaaatttatctgccctccaacagttgaaataccgatatttttcaaaagttttacataccgatctcagagctcttccctgggccgtttaaatcagaatctccgaacccgggggttgtgcgtgggtacattcgaagtctccgcaggcaattacaaaagtgcaaccggggaggagacctgctgctgggggagcaaatctcttaccacttcaggtgccctaggctctggcactgctctgtcacgttccgtctggttcccatccttccatccgtttctaggcaggtccgtccccactgggctgtaagctttgggatcccctggcgatcagctcgggaccctctatctgggcgttggcaggacgccgggggccgggagggacagaccgctaagcctggatcccatagtcactgccctggggtgccactcgcccggctcgtcctacagggctggctcggcgagcgcagatacgaccccgcagctgttcagaggggcagaaatgccctaggtgcccatccatgcctcgattcatgaccctggcctccagggcgcacagtggtcatggggagacctgagctgccgagtggccggccgacctcgtggcgcaacggtagcgcgtctgactccagatcagaaggttgcgtgttcaaatcacgtcggggtcagcggctatttttcttcggtttttattaaccccctttattttaaactacggtcgagcttcagcgttcaggtcattgaagaagcaatatctccttggggcctgaaggagaggggtttctggaagttccaaggccgccccgtctggacagcccaaccatcgcgcggggatttttgcgatggatccgggtaccgtaattctgggcggataacgcgggtcctaagacaggagcagttctagacctctcagcagagggacgagggtcgggccatcacgcatggaagaagtcggtctctgatctacgagttctctttccagtgccgagcggattccttccaaatgtgcagccttcacgacgtaggcgagccccacctgcaggaagttcaggttccagagaagtgagatgcggagggcagtctgaacagcgagggctgtctgcagacgaggtggccgagtggttaaggcgatggactgctaatccattgtgctctgcacgcgtgggttcgaatcccatcctcgtcggctaaggaagtcctgtgctcagttttgtagcatcaaaactaggatttctcttgttacccccagtcactccattcagttttcgtgtctttcccagctgcatccatcctttcctcattttcgtatgcagccgactttttgtgacatctttgtattcattctctgcaattcagctgacctggccaaggaaacaagatcctaagcgtctttccggcggcgccgtggcttagttggttaaagcgcctgtctagtaaacaggagatcctgggttcgaatcccagcggtgcctccgtgtttcccccacgcttttgccaacattaaacattgtgaggacagttgcagaaactcataacttccatcctacatggtttactcacgtacccatctatcctctcccggtgcatctgccacacgctgttgggtttttgctcttcgtgcacatggtacttgcgcctcgacctgcagttacaccagtcgcatcatctgtacttgccagtactgtctgttactcgtctaggtgctcagttagtcagtgtttgtgttctgttttcatttctcataaagcagtcccacaactgaaggtttttcccgagagaactgaacagtattgtaactaaatagatttatttcaagcttttcgtagcaactggccggttagctcagttggttagagcgtggtgctaataacgccaaggtcgcgggttcgatccccgtacgggccaggattgaaacttttcgaaagtacgattactgcactccgttttagagccaagtaacgtctctggggaaaaacagcgccacatttccaatcccagaacagggagcgtattggagcgcattctaaagtgggcgtgtcttgagaggaagggattgagagaaaccggggttgtttcgtgatctttgcttctacatcttatggccacaatatatggctcctgaacttactgtgtgaactgtaaacaaaaggctttgggacaaatttgtctcaaaccacgtggcactgatctgcagagtgtgggaaatggtcaggaatagagctgacaagtgttcccagtcttcccccagaggtaagatgtccgtccaatccacccagcccctgcctattcatgaggacctgagaagacaatttcttccccttctcttctagagcatcttttttacgtttctgtggttaccggatctctgggcccctgtgagtgattatctgtgtcctcacatttcccctcagaccagatgcttaagagcaagaaccatatctttccccacggagcctgagacatctccacccccaccccactcccagcaccagccccaagggagctgcgtgaacaacaccgaccctcattcccattcctttggcttattaatcactgcaaccccacacagactcagcctcagccttcgcagcagcagcactttaattccacaaaaactcagaaagccaaaactgattagaacactccacaacaggtgagcttcaaaaccagcaacattctacctgaaccctgagagcagtgagacgcctcccacctcaccccctccgccgtgcaacccattcctcctagctgcacgccggttctggctggggaagtggtatggtagagggccagagggcagaagcagaaggctctccatcagcaggggtgcatctttgcctgcggggtgtttggccaaggacggcacaagctcccacagcccctggcacctgagatgtggccactggagtcaggatagccacagtgggggctggggcttcctctgtccctttctcctgattacatgtgggagtcacgtcctcaccttcaagcagacctaaagccccgtgttcccagggctggtgctctagctagggaggagagttgggaagaacagggtagctacagatggccaactgaatacaagcagagcaacatcccttcccaccaggagagccgttagaacttccccacatacaccagcctaaggcccagcgagtgggcacgggccagctgaacgcatctggaagagcctccaacacacaggcctcccctcagtgggcacttcccaccaggactccctgaagagtccttagggtcctgctgggccctgccctggccaggaccggcctctcctgtcctcctggtcacttgcacagggcctccaacacctccagagtacgtcggatatcccggacttggcgcgccagcccctgaaccggctgcagagcccgctccagctcctcgcagcgcgccagcagggtgtacatgcccttgatgctcatgtccacggcttcacctaaggagtccacagcatcgcggtaggtctggatgcaacccacgctcagcgccgtcagctcctgcaccgcgccacccagaccgcgaagcagacggtccacccggcctcccagctcccgactcaaccgctccagatcccgcagcacctcggggtcgattgggggaatggccggtgtgggtgtgggtgcaggcgctgggcagggccgcgcaggggcagaaggcgggggtggaggcgcgccgctcagacggatcttgagttgcaggttgttggcgacaaagtgggtaaggtcgccgtggcggctcactgtgccttcgagctccaggggactggagatggtggcgcggcgtccgccgcccgcgccggactcggcactccctgaggacccggcgccaccgcacgcctcgctcagcccgtccaggctgcggctgtcctgaagacggctggagaacgagcggccggctctgctgcccgcggccgcctcctcgtcgttgtcttcctcctcctgctgctcaacatccatcccgccgcctggtccccctcgacggcagtccctcccggaggagggcttgccctcgggcggcgccgggttcttgtgccgggaggacagggaaggttcgtgctctgcacccggcgcccccctgcggctcccggccccagacagcgtcccttgagggccgggctcgttctccagagcctcccgttccggccggtggacgacgccgcagcttgacgtcttcggggacgtcctggggtggcggttcgcgcccccaacgttctcggtctcttcctccccggacacccggaggcctgcgggcggctcagaggacgttcggcccggcccgccgccaaagactagggcctgatgttccgctacagccagaaggtccgtctcgggcccgggccgcccccgagacgactccatactgcaggtgggggccgcaacggaggaattggttcgccccggctccggaggcagtggctgcgcctttaaggggcgttggtagaggcgagccgattggcagcggctgacaatggtaaggacaggaaaagcattttgattggtcgcggcgaccaggaagtcccggaagaagagctgttactgcacagcggaacacacgtgaacgccggcagggtggagagaaggaggtgacagctgctcccgtcgccccgccctttctgaaagctgatggggcagatcttaaagaccaaggtcctcaaattcctgagtcccgaggggtggggctcagatcctttctgcctgtaattgtaccccccccaacagtgattgcttagcaaaaataccaagtggggagcccacttggggttcctagagaggttcttaggatgaaaatggcatatccttcttggaccatcagggttgaacctagttgactaaaaagaaggaaaccagaagtccagcatgagcatgaatggtttgctctatctttcttggttaagagacctaaccactgaactgctcagagcgacccactgtggtcaaggcagcggcctctgggctttcctatgcgtttgtcactcttgttctgtgtctcttgcccctttcacactgaggggtctcgccccttggaggatggcgtgtgattttgccacgaggtaaaatattcaacaaatgaaatgatcacaaattttgatatgtgctatacaggaaataaagtgttatgattgagaatataactgagcaggcactagtttaggtaaggggtcaggaaaatacctctttggtgagacttttaactaaaaagaaccaaaaagacgcagccaccccccaggcagagagaagaaaacttgagctacctctcagagacaaagaagtcttgacgtattcaagaaactgaggtgagggggcaggagacattgggactaaaacaaaatcagcaagataaggggaaggatttcgagccaaggagctgaacaggcagcaggggccacgtcatgcagggggccttgtagttcctgttagggaatggagatttcctctaaatgcaatggtgcagcgacattggaaaggttgtacattgcaacacatagccaaagcttggagacatcagtatttttatttatttatttatttatttatttatttatttatttatgtatttagagacagagtcccactccgtcacccaggctggagtgcagtggcgcgatctcggctcactgcaacctccgcctcctgggttcacgcgattctcctaactcagtctcccgggtagctgggattacaagcgcccgccaccacgcccggctaattttgtatttttagtagagatggggtttcaccatgttggccaggctggtcttgaactactggcctcaagtgatccacccgcctcggcctcccaaagtgctagcatgacaggcgtgagccaccgtgcccggccagacatcagtatttaataaaaacagtttgctaactctccttagctgacaaaggatgtggttgttttttccatttggatagagagatgtcttgaggcagtgtcatgccagcattcagaagtgcaactccccagaacttcccagcactactatccccaggtgcctgccggggtcctagccagccaaccctaatgatagtagctcaatctttcaccacgcctgaggagtccacaattgtcagctgtctgtatcttatagtcacctgcagcttgacaaaacctgtcattcctttgctctaaaaaaaaaaacctaaaaagctcatatataattgggctgggtaggtagatattctttagaagatgggaggacttcccttgagaatgggaagctgagcacaggaagagagtgatgtgatgggattcatgtttagggattactggctgttgtagaaaatgtttgcaagggagacggtagaccagtgaggaggcggttccaagtaccaggtgatagtagctcagcctagcacgatgtggatggatgcattctagatgtatcttgaaggttttagcggacaaatgggctacccaccgtctctctgtgtaggggaagctcctcactcctcaactccccattccctgatgtgttggtgcaatgacagccaggaacaggcacgtgacccaaaactggccaattagagtacttcatccttctgactgcagattggctcagggaagggcacatgacccaatgtatgaccagtaaaaatcctccacagtgttgtttgtttctagctttgtggagagtgtgagacgcctttctgttctcttgagagctcaagctgggtatcagcttgtccatctttcatgtccaggagatcgctgtctgtagaaggaaagaatgaggctgataaggaagagaaccagagacaaaagatgaagaggcatgagttctgagagcgtttgaattcctgtgccagcctgaagatagccccacctttatccttcctgtgatttggttccttgccccacccctatcgcaccacctcccccgcaaaaccttgtttcttcctacggtgacttctgtctcagtaagtggcaactccatcttcccagtggccaaggccaaaaaccctggagttgtacttgactcctctttctgtcataatccatggccaatcctttaggaaatcttgttggttctgctcgaaaatacatccagaatctgaccacttctcatccttaccattgtttctgccctggtccaaaccaccatcatttttggcctggataaatgaagttgcttcccgaatggtctcacttcttctaccctcacctctctctacagtctattttcaatagagaaccagaatgatcctttaaaaatgtaaattatcagcagggcgcggtggctcacgcctgtaatctcaacactttgggaggccgaggtgggcggatcacgaggtcaggagatcgagaccatcctggccaacatggggaaaccccgcctttactaaaaatacaaaaacattagcccggtgtggtggcgcgcacctgtaatcccagctaatctggaggccgaggcaggagaatcacttgaacccgggaggcggaggttgcagtgagccgagattgtgccactgcactccagcctggcaacagagcgagactccgtctcaaaaaaaaaaaaaaaaaaaaaaaaaaaaattagccagacatggtgttgcacacctggagtcccagctactgtagaggctgatgcgggaggattgcttgaacccagaaggttgaatctgcagtgagctatcatcggactattgcactccagtctgggcaacagagccagaccctatttcaaaaaaagaattaactgattaggttaagagttatgctcctcctggagctagggatgggtcagttccttccaaattcaaacagttgcgacataatgggaaggcaggaggggctgtcaggaggctaccacagtgtccactacagtggggttcagcaaagtatagcccaagggccaaatccagctcaacacctgttgttatacggccatgagctaagaatgcttttatgtttttatttgtttgtttgagacagagtttcgctcttgttgcccaggctggaatgcagtggcgcaatctcagctcactacaacctctgcctcccaggttcaaacaattctcctgcctcagcctcccaagtagctggaattacaggcatgtgccactacgtctggctaattttgtatttttagtagagatgggggtttcaccatattggtcaggctgatcttgaactcctgagatcaggtgatccatctgcctcagactcagtgctgagattaaaggcgtgagctaccctgcccagctgttgaaaataatctagagaatatgaaagttggctgggcacagtggctcacgcctataatcctagcactttgggaaaccgaggcggttggatcacttgaggccaggagttcaagatcagcctggccaacatggcaaaagccctgtctctacaaaaagtacaaaaattagctgggaagccgggcgtggtggctcacacatgtaatcccagcactttgggaggacgaggtgcgcagatcacctgaggttaacagtgccagaccagcctgactaacatggtgaaaccccgtctctactaaaaatacaaaaattagacgcgcatattggcgggtgcctgtaatcccagctactcgggaggctgaggcaggagaatcgcttgaaccagggaggcagaggttgcagtgagccaaggtcgctccattgcactccagcctgggtgacagaacatttcatctcaaaaaaaaaaaaaaatagctgggcatggtgatgtgtgcccatagtcccagctactcgggaagctgaagcacgagaattgcttgaacccaggaggcagaggttgaagtgagccaaggtcgctccattgcactccagcccgggcgacagaacatttcatctcaaaaaaaaaaaaaaaaatagctgggcatggtgatgtgtgcccatagtcccagctactcgggaagctgaagcacgagaattgcttgaacccaggaggcagaggttgaagtgagctaagatcacaccactgcactccagcctgggcaacagaatgaaacgctgtctccaaaaaaaaaaaaaaaaaaaaaattcagagtctataaatttttattggaacacagctatgttcattcacttatgtattgtcttttttttgtgtgttgtattgttgttgttttttgagacacagtcttgctctgttgcccgggctggagtgcagtggcaccatctcagctcactgcaacctccgcctcccgggttcaagcgattctctgcctcagcctcctgagtatctgggactacaggcatatgccaccacacccggctaatttttttatctttagtagagacagggtttcaccttgttggccaggctggtctcaaactcctgacctaagatgatctgcccaaagtgctagcattacaggcatcagccacagtgcctggcctccaacagcattttattttattttgttttatttatttatttattttgagacgaagtctcactctgtcgcccaggctggagtgcagtggcatgatctcggctcactgcaagctctgcctcccgggttcatgccattctcctgcctcagcctccccagtagctgggactacaggcgcccgccaccatgcccggctaattatttgtatttttagaagaaacggggtttcaccgtgttagccaggatggtctcgatctcctgacctcgtgatccacctcgccccacctggcccgcctcagcctcccaaagtgctgggattacaggcgtgagccactgcgcccagcccccaacagcattttaaaatattatttttagaaagtaaaaatttctatgtaagggccaggcacggtggctcacatctgtaatcccaacactttgggaagccgaggccggtggatcacctgaggtgaggagttagagaccattctggccaacatggtgaaaccctgtctctactaaaaatataaaaattagctgggtgtggtggcgcatgcctgtaatcccagctactcgggaggctaaggcaggagaatcacttgaacctgggaggtggaggttgcagtgaacggagatcatgccattgcactccagcctgggcaacaagagtgagactccatctcaaaacaaacaaacgaaacaaaacaaaacaaaacaagatgtctatgtatattaatgcaattgggaacagcccatgttatacgtaagaaatgactgttatttccatcttaaagactcacaaaaggccaggcgcagtggctggctgggtgccgtggctcacgcctgtaatcccagcactttgggaggccgaggcaggtggatcacttgaggtcaggagttcaaggctggtctggataacatggtgaaaccctgtctctattagaatcgcttcaacccaggaggcggaggttgcagtgagctgagacagcgccaccacactccagcctgggtgacagagtctgtctcaaaaaaaaagactcacaaaaatacaaaaataacttggccaaggtcacatggctaataagcaatggtgaaggaattcaaagtgagacatgctgactcaaagtgaaagctcgatcatccacaggtctcacccctccataggccacagtaggggtgggggtcagattacccaccctcaatgttgccagtgcccacattacttcacagaagtagagagaagttatctgccgacctatcaggggaacaagcaaggctggatatcttttctgctttctttttttggcatcatccattcagtgggaaggtaaggtgatcatcaagtcccaaaaatgaacaaatgccccagtcagctatgctcagcatttagaagaatgtcaactaggacagttttctccccataccccagggcatcagcccttgtattgtctgtagggcttgttgagtgggatgggggtggaatgcaggttttatgtggcatgtagaattatgccatggttttacattacatttggggatggctcttgctctggatacttggaattttcacgtgtgaggagatgatgtctttgttttcttttcttttttttttttgagatggagtttccctcttgttgcccaggctggagtgcaatggcccaatcttgcttcactgcaacctccactcccggggttcaagagattcttctgcttcattctcccaagtagctgggattacatgcacccgccaccacgcccggctaattttttttttttttttttttttttgtatttttagtacagatgggatttcaccatgttggccaggctggtcttgaaccccagacctcaggtgatccacccgcctcggcctcccaaagtgctgggatgacaggcatgagctgccgcgcccagccgaggtcagagctttagtgatggaagtggaagagcagttacagaggagcatccattggtggggaaggaccagaactcttagggaagggcttctgaacccctcagaaccacctggggagttaaaagcgacatggatgctccagcctcaacccagatcaatgaaatctgaatttgttagggcaaggcctgggagttttttgttttttggtttttttttttttgagacggaatctcgctctgtcgcccaggctagagtgcagtggcacgatctcagctcactgcaagctccgcctcctgggttcatgccactctcctgccccagcctcctgagtagctgggactacaggcacccaccaccacgcccaggtaatttttttttgtatttttggtagagacagggtttcaccgtgttagccaggatggtcttgatctcctgacctcgtgatccgcccgcctcagcctcccaaagtgctgggattacaggcgtaagccaccgcgcccggtctcctattttctttttaagtccttcagatgtttctaatgtgcagccattgttgataacccctgaagataggaccttgccagccatgataaggagttttgattttattgtaaatacaccgaaaaaccaaaggagggttttgaacagaggaatgatatgctctgactttgactgttgggggaatggactctaggaggcaggaacagaagaagcagagagaatagttaggaggttgttatcacccaagccagaaaggatggtgacttgaaccagcatgagagtgatggggtgtgtgtgtaataaaggtgggcctctccatggatttggttggcaataggaagagttggaagatctggggaggtgaggaagaaaaaagagagaaaccaggaatgatttctaggtttttgacccaagtaactgggtgctaaatgatagtgctattgactgagatggggaagttacaacttttttgattgggtgggcactgaattaagaatactattttaggccaggcgtggttgctcccgcctgtaatccctgcactttgggaggccaaggtcgggggatcacctgaggtcaggagttcgagatcagcttggccaacatgatgaaacccccgtctctactaaaaatacaaaaaaaaaaaattagctgggcatggtggcgtgtgcctgtaatcccagctactcaggaggctgagggaggagaatcgcttgaacccgggaggcagaggttgcagtgagccgagatcatgccacagcactccagcctgggcaacagagcaaaactctgtctaaaaaaaaaaaaaagtactattttaggcatgcttactttgagaagcctattagattgccaagaatgtgttagtctcaagcttgatagggacgtcaaggtgagaaatacaaatgtgggagtcgtatttaaaaccacgggctgggccgggcacagtggctcacgcctgtaattccagcactttgagaggctgaggcgggtggatcacctgaggtcaggagttcaagatcaccctggccaacatggtgaaacccctactgaaaatataaaaattagctaggcacagtggcacgcgcctgtaatcccagctactcgggaggctgaggcaggagaattgcttgaacccggagggcggaggttgcagtgagctgagactgtgcgaccgcactccagcttgggtgacagagcgactccatctcaaaaataaaataaaaataaaaccatgggtttggcacagtggctcaagcctataatcccagcactttgggaggccgaggtgggaggatcgcttgagcccaggagttcaacaccagccttggcaacataataagaccccatctctacaagagaaaaaaaaattacccgggtgtggtggtgtgcacctgtggttccagctgctccagaggctgaggcaggaggattgcttgagcccacaagttcaaggctgcagtgagctgtgatcacaccactgcacttgagcctggatgacagagtgagaccctgtctcaaaaaaaaaaaagaaaaagaaagaaagtcgcagccaaagatttcatatttgatacccagattcttgtgttcctggaaaccaaagtttccagtatctgagaagttaagaaaaaataattcatactcccatacctttggacctttctccaggatttcttctgccttggcccctggaactgtgcagtcaacagtaatcttttcatttctcctgaaaacaaaagatctgacagtgcatctagttttggaaaacacaggggtctggcctgtgagttgctccaacaccttggctgcctgtgtcagtctgtcgtcactcttctccacacagatattgaggcagagcttacagatataaagttggcctgagccaaactccctggcctatttttttttttttttttggatgctagatgtttgcatggtgatgagacttatccagccaaaaaaaaaaaaaggatatatagatatagatatagatatagatatgtgtgtgtatacacacacacatatatatatatatataaatggtagaaaagcgaaaggggacaattactggaatgaagttgttgaatagtaggaggcctgggttcagagtatatctggaggggctccctgacaggacttgagaaggggaaagacagataataggtgaacagaggtaacttggggcaattggtgattggaatgtacaagacccctgtttggttctgctgtttctcagagaagagggggtatcactagtgtgggagctgtggggagctttggtgttttcgggagtagaaaagccaatatattggggatgctttgtaatgttagagtaggtagacatgaaggcaggaaagagggcctccaggtatgctgggcatttgtcaagccatggtcaagcgattagaaatctgtccctctgacataatgagcacgagaagggaagaacccccaagctggttctcatcgagtgaaggaccggcaggcatacaaccatccgtctgagataataagtggccatcgctggtgctgggagtaagaggagtcttgcaacaggagttagcaagccatcacccctataaggttttaagtatgtgcagtgaaaaaagaaaatggttgaatttgatcggtatctaaccttcctgtgggggctctggaccagaaagggcgaattgcccctaacgagcatgcgctggacttcggtgaacactgcgcatgcggtccctcccaaacgccggcaggccactgcgcatgcggcaattaagccacagcccgctcaagggaagaacataaggaggagacagagagtgcgggaaaacgtagggggtgtaaaatctctaaacatgccgggcgcggtggctcacgcctgtaatcccagcactttgggaggcagaggcgggaggatcacgagatcaggaaatcgagaccatcctggctaacacagtgaaaccccatctctactaaaaatacaaaaaattagccgggcgtggtggcgggcgcctgtagtcccagctgctcgggaggctgagacaggagaatagcctgaacccaggaggcggagcttgcagtgagccgagattgtgccacggcactgcagcctgggcgacagagcgagactccgtctcaaaacaaaaaacaaaaaactctaaacaaagaaaaggaaggggcgcttgatttttcaagtctccagccttgtcctcttctaagtgtactgtcttgtaataaactctcacttggcttaaaatcagttctcccttctgccttaaaccttgcctttggccgggtgcggtggctcacggctgtaatcccaacactttgggaggccgaggagggggcggatcacgaggtcaggagttcgagaccagcgtgggcaatatggtgaaacttcgtctctactaaaaatacaaaaattagccgggcgtggtggcgcgtgcctgtaatcccagctactcgggaggctgaagcaggaggatcgcttgaacccaggaggcggaggttgcagtgagtcgagatcgcgccattgcattccagcctgggcaacagagcaagattccgtcttgagaaaaagcaaaaaccttgcctttatctcgtttgaattcttgccctcgagaaaacagaggagagaggttgctgcagagttgcaactccggagtttcccggatagctgcaggcttacccgcaggtaacagtagaagtaggagtcagcgttaaggctgtgggaaaataggtgtccttcattattgccggtgggagtgtaaactgtccaccacttagaggggcatttttggtgatatctatagaccgtttacctgcgtgtacccagcattaccacgtctttctctagatgctggtactctccattgccatgtctttcttcagatgtcccctagaggacaactagagaccatcacaaaggtgcacaggaggcactcaaaagacactggccacagtgcaaagcattggaaataatctgcatgtgcatccagtagaagagctttaaaaaaaaccctagggatatccttattaaaaattataggctgaaaggccgggcgcggtggctcacgcctgtaatcccagcactttgggaggccgaggcgggcggatcccgaggtcaggagatcgggaccatcttggctaacatggtgaaaaccccgtctctactaaaaaatacaaaaaaaaaaaaaaaaattagctgggcgtggtggtgggcgcctgtagtcccagctactcgggaggctgaggcagcagaatggcgtgaacccaggaggcagagcttgcagtaagccgcgatcgtgccactgcactccagcctcggtgacagaagactctgtctcaaaaaaaaaaaaaaaagaaagaaagaaaattacaggatgggtgaagtggctcatgcctgtaatcccagcactttgggagacccagacgggtggatcactggaggtcaggagtttgagaccagcctggccaacatggtgaaacccatctctactaaaaatacaaaaattatctgggcgtggtggcacatgcctgtaatcccagctactcgggaggctgaggcaggagaatcgcttgatcctgggaggtggaggttgcagtgagctgagattgtgccactgcactccagcatgagtgacaaagcaaaactccgtctcaaaaaataaaaaataaataagcaccccgcccatttctttctccctagagatagccagttccaagtcttttcactgttttattttgatttgctttgggtatttaccatacttttttttttcttgaggcggagtatcactttgtcgccaggctggagtgcagtggcttgacctcggctcactgcaacctctgtctcccgggttcaagagattctcctgcctcagcctccctagtagctgggactacaggcacacaccaccatgcccagctaatttttgtatttttagtagaagcagggtttgaccatgttggccaggatggtcttgatctcttgacctcgtgatccgcccgccttggcctcctaaagtgctgggattacaggcatggcctactgagcctggcctaccatacattttttttaagttgttaaacaacagtcacgtatattttatttttatttttttaatttttacgttctcagggtgtacaagtacagatttctttttttttttttcaaaaggagtcttgctcttgttgcccaggctggagtgcaatggcgtgatctcagctcattgcaacctctgccttccggatttaagcaattctcctgcctcagactcccaagtagctgcgattacaggcgtgcaccaccacacccggctaattttgtatttttttagtagagacagagtttcaccatgttggtcaggctggtctcgaactcctgacctcaggtgatccacctgccttggcttcccaaagtgttgggattacaggcctgagccaccacgcccagcccctaccatacgtttttaaatcacatgcttccgttgctgcttcttaagttttcagttttaggcatgacctgtttttttcctgctataaaattcaaggaattcactcttccaccccactgccaccataattttggttagatttattcatttgacagtagttactgagtgtcctctacattccgggtactgttctagaggcttggtgtaaagcaatgaattaagaaaaaaaaaaaaaaatcaatcaatcctgccaggcgcagtggctcacgcctgtaatcccagcactttgggaggccgaggtgggcagattgcttgaggtcgggagttcaagaccagcctggccaacacagtgaaaccccgacccggtctccactaaaaatacaaaaattagccaggagtggtggcacatgtctgtaataccaactacacgggaggctgaagcaggagaatcacttgagcccgggaggcggaggctgcagtgagctgagatcacaccactgcactctggcctgggcgacagagcaagactctgtttcaaaaaaaaaaaaaaaaacttgtccaggcgtggtacgcctgtaatcccagcactttgggaggccgaggagggtggatcacctgaggtgaggagtccgagagcagcctggccaacatggtgaaaccccatctctactaaaactacaaaaaaattagccaggcttggtggcgtgcgcctgtaatcccagctacttggctggctgaggcaggagaatagcttgaacctgaaaggaggttggaggttgcggtgagccaagatcgggccactgcactccagcctgcatgacagggtgagactccgtcctgctgtgtagccaggctggagtgcattggtgcgatctggtcttgctgcagcctccacctcccgggttcaaccgattctcctgcctcagcttcctgagtagctgggactacaggtgtgcaccaccacgctcagctaatttttgtatttttagtagagatgggatttcaccatgttggccaggatggtctcgatctcctgactttgtgatctgcctgcctcggcctctgaaagtgcagggattacaggcatgagtcactgcgcccagacttaactgtttttttgtttttgtttttttttttaaagactctgagtaaactatgagtagaataggccctgtttaacctgataaagggtatctatcaaaaacctacagcaagcatcatgcataacagtgtaacctcatgtcaggaacaagacagaatcactgctgcttctattggctcctgtactagatcctgaccagagcagtgaaataatcaaagacagcttctagggtacagaactgtttagttgctcctacgttggcaaaggggcagagaatgaaacagaaaaggaaaaactagaagttggacaaccaagagagaggtgaaagaaggtggccagagatggctggtgttccaatgtagcaatggggagccagggcccccagtgcccctgggctgtgggagtctgagcaacggaaagaatagacagtgagggtagaggtggaagtgggggtaggggttggggtggctgggagctgaccaggtgggtgtcagagctgagagggtagggtgttaccagggatagcaaagtaatgctcatcccggctcctcagggtgagccagctctccttctagggaacagcttcctccacagcaaagcctccacctagaaacatctacactcatgagtacaaaaagcttcagcctttattaaacaaaggaggaggtagaaaacagataagggaacagttagggatcccttctttcccctatacatacacagacatacaaacacacgcacccgagtgaatgacagggaccatcaggcgacagattgaagggcagagggaggcagcaccctccgagagttggcccggacccaagggtgggctgagacctgggccaggggcagccgttccgaggggttatgcctgagcagtttggagatgaggtcctgggctcccatgggcacggaagcggggaactttaggtccacctgcaggtgtgaagagatggaagggctgcattagtttcaccctggctacatcttccttgactacccattctgtttggagttacttagggccatgcaaatacactctgcccacccccagccccccagctcctggcttcagcagctggcacgaagcccaggccgccctcccaccttgacgatgcggcgataggtctcgttgtgtgatgcactctcaaagggtgggttccccaccagcagctcatagcaaagcactccaatgcaccacagatccaccttctcattgtgcatgcgcccctcaatcatctctgggggcaggtagtccagggtgccacacattgtcttcctcctgggagggataaggggcgtgggcaggggtcctagtgacataggaactctcctttccctgctgcctgacggctgggagccaaaagaccacgggatgtaccaggggagaggtccagccaggcaaggccactggagtgggggtggggttggggtgatgatatatcccaaagccccagaggtgagcctgcacacagcccagcaactccacactgaaggatatatcttaataagataccctgatatgagggcagtgttcatttggagttcactggggacatctctaatgcccatcaggcatgttctggttaaataaatcagctactatgtgatactatgaaaccattaaaaagtgatgtgggaggaaaaaaggccactgctccgggctttttttgagagagtccaggctggagtgcagtggggcgatcttggctcactgcaacctctgcctcccgggttcaagtgattctcatgtctcagcctcccgaacagctgggattacaagtgtgcaccaccatgtctgcttaataaattttgtgtttttagtaaagatggggtttcatcatgttggccaggctggtccgctggtcttgaactcctggcctcaagtgatccacccgccttggcctcccaaagtgctgggactggtaggcgtgagccaccgcgcctggccaaagttttaccattggcccctacagggatcaaacctgcgaccttggggttattagcaccacactctaaccattttttttttttttttttgagacagagtctcgatctgtcacacaggctggagtgcaatggcgtaatctcggctcactgcaacctccgcctcccaggttcaaacaattctcctgcctcagcctccccagtagctgggattactggcgtccgccaccatggccggctaatttttgtatatttagtagagacaaggtttcatcatgttggcaaatctagtctcgaactcctgacctcaggtgatccgccctcctcggcctcccaaagtgctgggattacaggtgtgagccacggtgcacggcccctggagaggttttaatggcccagcctcacacccaggtctggcctcccaggccaccatacctcagggagggcgcatgcacagaccagccgaagtcagcaatcttcagctctcccttgagccctaagagcagattttctggctttatgtctctgtgaatcaccttcttcccatggcagtacattagagcatctgccaactcctccatgatctgggaggggcaacgacaggcaatcagacaaggatggacctccagctacaagcagcacaccctcagcctcgagccccctactggcgccccaggtgcccacccgcccggaccgtggctgttcgctgctcgtcaaatgtgcagctcttctgcagctccttgtagagctccccgcggggggcatactctagaatcaagtagatcctcctccggtcataaaaatagttgtagagacgcaggatgttgggatggctgggggaagagacagaggaggcctcaggccaaaggcataaaagagctggaaaagatgataggagcaaactggggtcagacgtggcccaggccggggacaccagggctgggagtggtaaggggaaactggaggcagatttctggattcaaggcttgccaggactaagagctaaatggggctcactagccatagctacagagaaagcaatctggatgaagtggggctgaatgaggagctgggggtgagggagcagaggggcttcggctcagggggcatcaacccatactgcaggtgggcctggatttcgatctctctgcgcagctgatgctccacgccctccttctctatctgggacttgaagaggaccttgagcgccacgatgaaatggcttttcttctcccgagccaagtacacgtttccaaacttgcctttgcccagaggacgcccaatctcaaagtcatcaattgtgaagtgccgcctgcttagaaagtggaggaaggcaactcagaaccggttttggttattaagaggtttgctttctctctgcttcctcatcccatcctgtcctccgccccacttgtcttcatccctactcctcccgtgcttaggttttatctccccgacttcctgcctgttcattgtcccctcacccccgtccacccccaggcttggggcacttacgttaagatgtcgggtgtcccactgctattctccatcaccttctggccaggggcagctaaggagagaacaggtaggttgaatgcgaacagggatgaccttctcatccctaaaccctcccacagacggtcatctccccagctcagtcctctcccccttgcgccagttacctgtgggctggacattggagcggctcatgaggacaagtgcagatggggtgacaggctctttccggaggactcgctggggcagggtgctcaggccagatggagcctgagaaggagcagggggtagctctgagggtgcctttgtctgatgaccggggtggaatgtgctgcaagcagtatttcagccccttgctaaagagccacccacccacctacccccaattcaaagagaaacactgatgtgacagttttgcttcccagcctctgctcatagtcccatattaaaatgggttattaataaacaacctagggctgggcgcagtggctcccgcagtcaggagttcaagaccagcctggccaacatggtgaaacgccatctctactaaaaatataaaaaattagctgggtgcggctgggcgtggtggctcatgcttgtaatcccagcactttggaaggccgaggcaggcggatcacaaggtcaggagtttgagaccagcctggccaacacagtgaaaccccatctctactaaaaatacaaaaattagctggccgtggtggcacgctcctgtaatcccagctactcaggaggctgaggcaggagaatcgcttgaacctgggaggcacaggttgcagtgagccgagatcgtaccattgcactccagcctgggcaacagagctagactccatctcaaaaaaaaaaaaaaaaattagccaggtgtggtggcaggcgcctgtaatcccagctactcgggaggctgaggcaggagaatcgcttgaacctgggcggcagaggttgcagtgagctgagatcgcaccattgcactccagcctgggcaacacagtgaggctccgtctcaaaaaataaataaataaataaataaataaataaataaataaaaaataaataacctaagtaggcctaagataaggggcaaaggactcacaccaacacctaacatttcacttctttggccctggcccacacttttcaggcatgaagctgttcaacctgtataagtcctgtccataacaacacagtcattcatccagcccctcacttacaccacagtagagagctgcgtcaatgaacacccacaattcaaggggtttagcacagaggtattctcaaagtctcctaaaaagcttagtttattaaggcttagataagatgcttgaggccttgaatgttatagcaataaccaggatttacacttttgcaagaacaggctttaaggacactaagagctaccctgatggccctggaccacttctcactttcaacttcttcatttttttttttttttgagatggagtctcgctctattacccaggctggagtgcaatggtgccatctcggctcactgcaacctccacctcccaggttcaggcaattctcctgcctcggcctcctgagtaggtgggattacaggcacatgcctggctaatttttgtatttttagtagagacggggttttaccatgttggccaggctggtctcgaactcctgacctcaggtgatccacctgcctcagcctcccagtgctgggattacaggcgtgagccacctacctggcctcactttcaactctcaaaataataggtacattttcttttaggagtgactaaggtaaaagtgacaatggtttctcattcagactccattcctgacagcctcactcagtgctccatgagggagggagctgatgtacaagggaacagacagactctccaggaagcaagagctccaaaaacagggagcaaagcctgtgcagggccccttccttcttctgcagccaagagaagaaagcccctaggccccaaatagtgatattggtaccaatctacaaataagcaagttgaataaaatacagtccagaaatagacccacatatatgtgggaatttatatatataataaaggtggcatttcaaatcagagaggaggcccttcaatgaaatctgtctggaccattgggaaataagtcaatttagatccatttagattcttacctcaatttagtcattaattccaaattgtaatttagacttgccctgggccttttaaactgtaactttatatccttttagagtctatttctatttgctgtctagttttttttttttcaggatatggattgggaatcatggcctgaaggccaggccctgcctgctcagtcccagatatcatttgtatgtgacgagccctgcagaggtcctcaccagctgggagtcactggctggtcagattcacgttggcagcacctgacaggatgtggctacaaatgaccagagcgggttctgtcgtcaaacttgggacccgtactttggagcataacggggaagaaagtgcttaaaggattgctcattgcaggatctcaagtttcccagcaggaactcgccatgcggggtcatgggggcgcagggacggagggaagggccttaccgtctgtcggccgtagggccaggggtaggagttctccttctgggccatccttagagagaaagggggaggagagctgggcggagaagggaaacagccgtgagaagcagagaaaaagagagagagagggaggggttggaccgatcgagccggaagcgctagcccgagctggtaaaagggagcaggtcagcacactagccccaatctgggcgctggtctcaccgcccccgccctgctatcgtccctacctccttccagccctgcggcgtgcgcgcaggccagcccaacggaccctctgatctacctgatcatctgcccactcccggcgcaaggcctgcgacaggaggccagctcacctggggtccaaggcactgctactctcccggccgcccgcaaacaactgaatctgccacgccgcgccctggccaaggacttttcaaatctcccgccccggccccattgggcaagctcgtcgcccatgcctagttcccattggctcgatgtcctgtgacgtaagtcatgggaacccaatggaagaggcggaatgagaagggctcacgcttggcttccagtttaggaaagtttccccaaattcccccagtgaattatcttgctttttcttttctttttttttttccttttttgagacaggtctctctctgtcgctcaggctggagtataatggtgctatctgggcttgctgcaacctctgcctcccgggttcaagcgattctcgtgcctcagccacccgagtagctgggattacaagcgcccgccaccacgcctggctaatttttgtatttttattagagacgggttttcgctgtgttggccaatctggtctcgaactcctgtcctcaggtgatccacccgcctcggcttcccaaaatgctgggattacaggcgtgagccaccgtgcccggccttcttctttttataaaaaaaattaaatctttaatgtaactggagtttatccttatgcatgtatgagctggggtctaacttctctgcccgatggagcgccagttatgtcaacaccatttgttaaacaaactgccccaacagaatttaaatgctgcccttgatatataatgttagcatatttacttgtgtctatttctagactttgtattccgttgtttgctcatttgcctgtgtgtttattcttgtgtcattactatgtcgttcttaaaagttctgacattcctgggaggagtttttccaccaatagacctttcgttgcaagatctctgttagctgccgtgttgtttgggcccactttcatttttcctccttcctgccacacttccttcttttctgctcttcctaaccctcagatttcattactgggttaaataaatacatttttgggccttctatgaaataaccagtggatatttattaagtatgtactgtccagcactcttctcctttcttctaacactctatttttcctttaggggaccacctgtctctccagtctatgcagtcggtttctgtagtagtttctgttgctgacaaccccaaatccctaggttgatgaagacctatttaaatctcacttttttttttttttttgagatgaagattcgctgtgttgcccaggctggagtgcaatggcacaatctcagctcaccacaacctcctcctccagggtgcaactgattctcctgtctcagcctcccgagtacctaggattataggtgcatgtgaccacgcccggctaatttttgtatttttagtagagacggggtttcatcacattgctcaggctggcctcaggtgatccgcccgccttggtctcccaaagtgcttggattacaggcgtgagccactgcgcccagctttattcccacttctgaaagcacttagagttttgaggatttgagaaggaaactgacttcattgcaggtccagaaatgagccccaattaacttatactaatcaataccttttattccagattatggttattggatcaggcataagcctgtgatttaagtgggccagctagtgggaatcagtttcttgctcagaatgctgggcagctcaaggaaacacttaacgtttactggtttatcataaagtgtattacaaatgatatagatgaaaagatgtatagggcaaggtatggaggaagagatttctggaagtgagcagggaagcatgcagccctcattgctgcttctagtgctactgaaggaagcagcttgacattgaagcctaacattgcagaaggcagaagagaggcctggaaagaacttcaggacttgatgacattgttgagcctctacatgcctacgttagcacttttcttacatgaacaatagagaagattattattcagctaatatcctttctgaatgcattctaaatgctatttgctgtttaagcatattgtgtagaaaaaacaaaccatggctaggcttggcggctcacgcctgtaatcccagcactttgggaggctaaggcggctgtatcacttgagcccaggagtttaagatcagcctgggcaacctgtgaaaccccgtctctacaaataaaaaaaaaaaaaattagccagtatggtagtgtgtgcctctagtccaagctacttgataggctgaggcaggaggatcagcagaggccggaggtcaaggctgtggtgagccatgattgcaccactgcactccagccccgacattagagtgacaccctgtctcaataaaaacaaaaaatgggcagggcgcagtggctcatgtctgtaatcctagcacttcaggagcccaaggagggtggattgcctgagctcaggagttcaagaccaccctgggcaacatggtgaaaccccgttactactaaaatacaaaaaattagccagttctggccaggcgcggtggctcatgcttgtaatcccagcactttggcaggctgaagtgggtggatcacgaggtcaggagttcgagaccagcctggccaacacagtgaaacccgtctctactaaaaatacaaaaattagctggatgtggtggcaggcgcctgtaatcccaactacttgggaggctgaggaaagagaatcgcttgaacctgggaggcggaggttgcagggagctgagatcgcatcactgcactctagcctgggtgacagagctagactccgtctcgaaaaaaaaaaaaaaattagccagttgcggtggcgggtgcctatagtcccagctactcaggaggctgagtgaggcacaagaattgcttgaacctgggagtgttgcagtgagccgagatcacgccactgcactccagcctgagcaacacagcaagagtctgtctaaaaaaaacaaaaacaaaaaaagacccaatttttcctctgccctcacaccacagcaatcaacacaggagacttctgcgaccacatgtgtggagattttactgcaccaccaagcaatcagttctgcaatcaagcaatctgttctgcagcagacatcagctgggtgtcttccgattagattctgacactatctacccagagagagcatcagatcccataggttgagggctcagtcccacaagactgcccctcactttggatgccaactgcaagcctcaggttgtttttacctgtactcatgactaactgggtgtaagctagggttcctacgattccctctttatgttcaatgaatttgctagagtggctgacagaactcaggaaaaaatgtttactggtttattataaaggattttttttttttttgagatggagtctctctgccacccaggctggagtgcaatggtgcaatctcggctcactgcaacctctgcctcccggattcaagtgattctcctgcctcagcaggagaactcgccaccacgcccagctgatttttgtatttttagtagagacggggtttcattacgttggccaggctggtctcgaactcctgacctcgtgatccacccgtcttggcctcccaaagtgctgggattgcaggcgtgagccaccgtgcccggccttataaaggatatgaccaaggatacagatgaagagatgcacggggcaaggaggtgggaagggcatggaacttccatgcccttctgaggtgtgccgcccttcaggatgctccacgggttcagctctcaggaagctctctctaccccatcctcttgggtcttttatggagacttcattaaataggtgtgattgaagcatgacgactgtgtagaaatgtgattggacgaagagggtatgatctagtactaataggctgagtggggaagcccagcaaggcctgtctagattcttcccggcttctctgtgcagtattccttccaccttctgaaatgggggtcttatgacctataattgaacaagattgttcagagaatttatttatggccagcttcaggacagacaggaaagaggtaagataagatatatatatatatatatatatatatacacacacacacacagtttgtttgtttgttttttgagacagagactcgctctatcgcccaggctggagtgcagtggtgtgatctcggctcactgcaacctccgcctcccgggttcacgccattctcctgcctcagcctcccgagtagctgcgactacaggcacccaccaccactcccagctaatttttttatttttagtagacatggggtttcaccacattggccaggcttgtctcgaactcctgtccttgtgatccatccacctcggcctcccaaagtgctgggattacaggcatgagccactgcacctggcctttttttttttttttttttaagagaaggtctcttttgtccgaggcaagcactcttgctgcacaatcatagctcattgcagcctcagaacaagtttggacttggttacaccaatttgcttctttaatctatcaatttacctttaactgccggcacatcaacgtagtgaaatatacctcatgtatttgcattgccattgtctcttctgtggagaggagggagcaggcagagatggttggtcatcaaaggggacttaagttttgcctttaatgttctaattttttagaaggtgtatagagtcatggaactgtttgcaggattaaatattaatgacaaataatccctaaaaagaaggtgtggaccaggcacggtggctcacgcctgtaatcgcagcactttgggaggccgaggcgggtggatcatgaggtcaggagttcgagaccagcctggccaacatagtgaaaccccatctctactaaaaatacaaaaattagtcaggtgtggtggtgggtgcctataatcccagctactccagaggctgagggaggaaaatctcttgaacctggaaggtggaggttgcagtgagctgagatcatgccactgcattccagcctgggtgacagagcaagactcatctcaaaaaaaaaaaaaaaagaaaaaaaaaagaattgaaaggaagtatcataaatattcagaagcagcgttattcacaacagccaaaagttggaagcagcccaaatgtccatcaactggtgaatgaataaacaaaatgtcatatatccataaaatagaaacttacttagtcctaagaggaatgaagtactgatattttatttcatggaaaccatgaaaacagtataaacaaaagaggctaagctgagcacagcagctcatggctgtagtcccagcactttggaaggctaaggtgggcagatcccttgagcccagaagttccagaccagcctgggcaacatggcgaaatcccgtctctacaaaaaatacaaacattagccaggtgtggtggtgggcacctgtagtcccagctactcaggaggctgaggcaggagagccgttgaacccaagaggcacaggttgcagtgagccaagatcgtgccattgcactccagcctgggcaacagagcaagactccgtcaaaaaaaaaaaaaaaagatagaaagttcacatattatatgattgcatttacatgcgatatccagcataatatccagcataagcaaatccactgggacagaaacagattagtggtttccagagactaggggaagggagaagggggaatacagagtgagtgccaatggtttctttttggggggggggtgattaaaatgttctggaattaaatagtgatgattgatgcaccactgtgagaatataccagaaactcttaattgtacactttaaaatggttaaaatggtaaaatttatgttaagtataatttaccacaaaaaattataaaatatcttttttttttttgagatggagtcttgctctgtttcccagactggaatgcagtggcatgatgatctcagctcaccacaacctctgcctcctgcgttcaagtgattctcctgcctcagcttcccaagtaggtgggactacaggcgtgtgccaccatgcccagctaatttttgtatttttagtagagatggggtttcaccatgttggtcaggctgttctcgaactcctgacctcgtgatccgcctgctgcagcctcccaaagtgctgggattacaggcctgaagccaccgctcccggctcttttttatttatttattattattattattttgtcttttttttcttcctttttgtggagaacagggtctcgctatattgcccaagcaggtctcgaactcctgggctcaagctatcctcccacctctgcctccatgagagctgggattacaggcatgagccaccacgcccggccttattattattattttgaaatggagtttcactcttgttgcccaggctggagtgcagcagtgcaatctcagttcactgcaacctctgcctccccggttcaagcgattctcttgcctcagcttcccaagtagctgggattacaggcgcccgccaccattctggctaattttttttttttttttttttgagacacagtgttgctcttgtcgcccaggctggagtgcaatggggtgatcttggttcactgcaacctctgcctcccaggattacaggcgtgggccaccatgcctagctaatttttgtatttttagtacagacaggggtttcctcattttcaccaggctggtctcgaactcctgacctcaggtgatccacccaccttggccttccaaagtgctgggattacaggcgtgagccgccacacccatccaggaatacactttaaaggcacttgtgtgactgctattaaattagtcaaatcttaacacattttgctatatttgtttatgatgtttttttaaatgaactaaaaggcatacaggtggagttccagtgtaaaatttcttttttttttttttgagacggagtgtcgctctgtcccccagggtggagtgcggtggcgcgatcttagctcactgcaagctccgcctcccgggttcacgccattcttctgcctcagcctccctagtagctgggactacaggcacccgccaccacgcctggctattttttttttttttttttgtatttttagtagagacgaggtttcaccgtgttagccagaatggtctcgatctcctgacctcgtgatccacccgtctcggcctcccaaagtgctaggattacaggcatgagccaccaggcccggtcagtaaaatttcaagaagtaggccgggcgctgtggctcatgcctgaaatcccagcactttgggaggccgaggtgggtggatcacgaggtcaggagatcgagaccatcctggctaagacggtgaaaccccgtctctactaaaaatacaaaaaaaaaattagccgggcgtgatagcgggtgcctgtagtcccagctactagggaggctgaggcaggagaatggcgtgaacccaggaggcggagcttgcagtgagccgagatcacgccactgcactccagcctaggcgacagacagagactccgtctcaaaaaaaaaatattttcaagaattaggtctaggtatattgtttctctaccattttcttctgtggttgttatggatgaaattgtgtttctccaaaatccatatgataaagctttaacacccaatgtaaatgtatttctagacacagctttagggaggtagttaaggttaaatgaggtcatttgagtggaatcctaatcctacagggctggcatccttaggagaagagggagagactccagagttctctctttccctgtcggcacagaggaaaggccatgtgaggacactgcaagaaggcggcatgtagaagccggcaagagaggcctcagcagacaccaaccctgataacatcttgatcttggactttgagcctccagaacagtgagaaaataaatatctgttgtttaagccacgcagtctacggcattttgttatggtagcctgagcagactaatacagattctaaggtcagtggaaaactacaagcggaagcactcagttcagataggactactagtggcttagacccttcaggaacaaggtttgggtctccctacgagggaaataaccaggaccagttgaggggcttgttgaagacaatgggaagacaaaatgggtaatagaagaagctagttaggccaggtgcggtggctcatacctttattcccagcattttagggggctgaggcgggaggatcacctgaggtcaggagttcgagaccagcctggccaacatgatgaaaccccgtctctactaaaaatataaaaaaaaggctgtgcacagtgggtcacgcctgtaatcccagcactttgggaggccgagatgggtggatcacctgcactctactgcactccaacctgagtgacagagcgagactccatctcaagaaaaaaaaaaaaaaaaaagaagcagcagcagcagcagcagctagttatcagctaccactacgtggccagttagagaaacaaggactgtaagtgtatttcctttttttttttttttttgagacggagcgtcaatctgtcgcccaggttggagtgtaatggcatgatctcagctcactgcaacctccgcctcccaagctcaagtgattctcctgccttagcctcctaagtagctaggattacaggcatgtgccaccatgcctggttaattttttttgtattttgagtagagacggggtttcaccatgttggccaggctggtctcaaactcctgacctcaggtgatctgcccacctcggcatcccaaagtgctgggattacgggcgtgagccaccacacctggctgtatttcttctttattttgttacgaatatatctgtgtgtgtgtttcagctaataaatgtacacaaaatgatagaattaggaaatgatcattttgcatctccttatgaaataattaatgcaggcaaggttttctggttgccctggcagtgagaatggtggtgggactgcttggtagccagcctcacagccagctccgccttaggtcgccagagtttctatgctgttaccttgctcaggtcatcagcagttcttcaagcaccatttctgcaaggactggtcaactgtctgcctttgtcttgtacatagtgatacagtgacacagagacagctatggcagaaggtgggcaggggcaagaaaggggaaggaaagcggagcacagattttaacctgggcaatgtctgctgtgtggatggtggtgagatggcccaaattcttccccatcaaccaaagccagtcacacttagaaaggtattgttagtggaggagagagaggtgaagggaataaatttcccattggaaaagacaaggcatatagggtgggtggcctggatttctttctttctttttctttttctttctttctttttttttttttttttttgagagagagtgtccctctgtcgccaggctggagtgtagtggtgccaatctccgctcactgcaacctctgcctccggggttcaagcgattctcctgcctcagcctcccaagtagctgggactacaggcatgcgccaccacgcccagctgatttttgtagtttttagtagagacggggtttcaccaagttggccaggatggtcttgatctcttgacttcgtgatctgcccgcctgggcctccctaagtgctgggattacaggcgtgagccatcccatcccaccggttttgtttttcaatatactggaagcagccaaaatgcacgtggtcctgggcttctagtgactgctgggaagtctggagaaaggtaatatttgtatttaatatccttgtgttcagtgttaagtaaacatacctagaacagcagagattattaaaaacatttaaaaaggccgggcacagtggctcacgccactaaaatacaaaattatccgggcgtggtggtgcatgcctgtaatcccagctactcgggacgctgaggcaggagaatccctttgaacccgtgggcggaggttgcggtgagccgcgatagtgccattgcattccagcctgggcaacaagagagaaactccgtctcaagggaaaaaaaaatacaaacaaaaaataataatttaaaaaattatttaacaatttccatacaacagggaatttttttatttttaaatttatttttacttttatagaccttagggatacatgcgcagttttgccacagggatatatcacataatgttgaaagtctgcacccaacttctgaataacgttcatatttgtctcattcccctcctatccttctactgaggaggctttttttttttcctatcctgaaaaatgtcaccgtaggtctatttgattagggaaaacaatgttttgtttgaccccgacgtgatttgaacacgcaaccttctgatctggagtcagacgcgctaccgttgcgccacgaggcctgtccaacagcgtgacttgatgggtctgttgagcagcaataacgggcggacttttgtcatgaagccccacctttaagatttgtcagcgcatttctctgaggcaccagctgacgagatgtgggcgcatgtacgtaggaattaaattcatcctctggataaataatagagaggcaagttgcgtttaggcgcatttggcttaaggcccaattccttaactggaatcacattgagctcgttgagctcactctacagagaagccatttttatgtgtctaggcctttttttttgttttctggagatgataaatcatggtgtcgctgcagttctcgccccctggacaaatcttagacgtaatcccagctctgccggtgactcagcttccctggatcttggtttcctcgtctgtagactgggcataaccctacaggttcatgtggggtgggtggcgcgcgctagcggtgaaggtcactcacaattgcgcgctgggcagacgacggcagccattacttttacctcgatcgctgttttcctggatccgcacgggtccaacccgactcatcccaaccaacctgaggtatgaaaaccaggaaagagagctagcaccggagcgttggtggtatagtggtaagcatagctgccttccaagcagttgacccgggttcgattcccggccaacgcaagtcgttttgggtgttttttcccccccccgccttttccttttcgtgttttctgggccccagcatcgttgagggttttcgtgaggttttcctgaggaaacttccgctccgaaaggacccactttccgctacacccgcgaccacggctggaccaccgcgctcctgacggatgcgccctgcaagcccctccaggcgagagcagcgcgtcggaatctcggcccggggttgcctactgttcccggatcgcagtgcgaatccacaaaaagcagggaggcgaaaggaaacaaaagcccgggctctgcaccctggacggctgggggccaaagctacttgcccaggttcaagcagagactggaaatgcgcacttccgtcaaggagggagcaagctaggccaagtctgagcgctaatgagcatactgagcagagcagataatggccactttaggtacacgtttgaactctaagttgcttgaagtaaaatggaaacttagaatgcgagctggagaggaaggccaaactctcctcccctcctcctttccctcttttttatagctccatcccagggaccaggacggatttaatgaaagcaaaaagatagaagtttcaaaactgctagtactctccccgtcggggaatcgaaccccggtctcccgcgtgacaggcggggatactcaccactatactaacgaggagggacctgtagagacctttctccgaatccttgatctgagactttacactctgcgtgctgacagcagggttcctaggggttctgttcttccaaccactgataaacgctgaccagaaaccgtaggtgtatttcaggcaccaatcgtcagatggagtgaccgaaagagacagagtgccttcaggactgcagagaaccaagttttgacagttcctgggctctcccgaacactgtcatccacaactatagattgacgcgtgtcaatcaaagcgaaaccaggctgtggtggccgagttgagacaccaggaaggaagtcaggaagcagaaagggagggacctgcccaagtctgggcgtgcctcgtctcttcctgacatgccaggcgggtctggggattgagatgctttctgctaccgcggtgccacaaaagagcttactgtacattgatgacttacagtcaagcctcctgcagcgctggtcaggtaacctattccttgaagacactcttgtctcagtaaaaggtaaaggagggctcgtccgggatttgaacccgggacctctcgcacccgaagcgagaatcatacccctagaccaacgagccgacgtgcggacgttgccgcgaaccgccttagaggtcgtgccaggcttgctgtagtgctgggtccactatgcatggcggaacggtccgggcgcacgctcacggaccagcctcccccaggccgagtattttggagcactgggctgggaatctcttggctccgggccgcgagctccggctcctcccaggaaatagcgtcaaggaagtgggagggagtggcctcggcctcgcccccgcgccgccttgcacgactgccttgaacacccgggttgttgcttcctttggttaccgacttggtgccattccgtaacctgggatcttgacacttcctgcctccgcctgcggtccttggacctagctcttcgttgcagagctttgaagagaagcggtggaattgcttgctttcgggacgggcaggagaaatcactaggggaacaccagtgccccgtgtctgtctatcctcctgggctaacgggcagggcaaaccctgggccagacccatcgatagtccacgggttccccagaccgcatggcagtacccaagcgagggaaagagggaacgatttctggggcccagaagacccacggaagagggcgttattgagctgggtgactggagggggacaggctttccaccctgcagtggggcggggcgcaaggccaggcgactagtctcatggcttccggactgtaagatcaggttacccctaccctacagtctaacctctgctccccagtcccctcctagaatggcctagaagggagaccctcctgcctgcctcctaagaccccccgaaggctctgaggcacgtggccgcatgaatgtggtcgaaggcctgtagacccggtttggggacttagcagtgtccccgggactgcccagtgagcctctgcgctcttaaacactcaccatgctgctcttactccggagctgcccagagtcccagcaagatctggtggggtcggtagcagaccacgtgtcctgcctttcctcagctcagtgcctgttctggggagtcctcccagcggggttctggcctgcatcggccctggaccagcctggtgtcatctgtggaaccattttgttctacaccccagttgtgtgatttgtggggccaggccgttcctaatgcccaacccatagatacgatgacggggctttcagtgaaggattcagctcctatttgtctttcccaggttcccctggacagacagtggggaagggcagcagaagttagcccagcctttcccattagtgtcccaagtctttgagatgggtaaagaggttctcagggctgatctggcatctcctcccccattcctacccttttccaattcctgtctccctccccttgggccccagctttctctgcaaaataatccagtcacctcttccctggcctcaggcacttaaacgctgcagaaggggaggcctaaatcctttatgacccttatgaaagctatgtccctcttcaccgggcacagtggctcacacctgtaatcccagcactttgggaggctgaggtgggtggatcacaaggtcaggagttcaagaccagcctgaccaaaatggtgaaaccccgtctctactaaatatacaaaaattagccaggcgtggtggcgggcgcctgtaatcccagctactcgggagactgaggcaggagaattgcttgaacccgggaagcggaggttgcagtgagtcaatattgtgccattgcactccagcctgggtgacagaatgagactccctccgtctcaaaaaaaaaaaaaaaaaaaaaaagctatggccctcttcctaaacatgtatacaatccagggagttcacacataatcccatccacataccccacactttattttttcctcagaaaagtgcgtacatagaccccacttttaataaccaagaactaacaaacagctgatcattcgtttattttatttcatttttttgagacggagtttcactcttgttgcccaggctgggatgcagtggcgcgatctcggctgacaacacctcctcccccctccaaggttgaagcgattctcttgcctcagcctcccaagtagctaggactgcaggcgcctgccaccacgcctggctaattttttgcatttttagtagagacgaggtttcactatgttaccaggtttcactatgttggccaggctgctggtctggaactcctgacctcgtgatccgcccaccttggcctcccaaagcgctgggattacaggcgtgagccaccgcgcccggccatacatggcaagtttctacatggtgtttcagacttagctgatcaccctctaccctcaggccagattagattccacttctccctgttcttacagtgccgttagtgctgaaaggggaacgtgccttgttcatttggttctgcacagggtccagcccagtgcttggcacaaacgtggtctcggcagtgctgcatccctggcttgacctggaggtagcaattccttcaagccatttgctcatcttacattggttcgtgggccatggaatggtgtcgagagctttctgcctatcttccaaggaggtttaggtcctgccaagagctcacagatcctatttcttgccttatctctggcatttatttcttccttaaccagcctagcttcagtgctccagaaaagtgccctgcccttccacaccaggatccctagcgactcccgaatgatgctttcttggactctgttcacatggcctcagcccttctgcaccctgctgcacgaaacctggtgccaggccaggccaggccagccggatccctgcttactccttaccctgacatcccgctggtggagagggatggaggtaactgcaagtgaaagaccagttagaggaccgcatctggaagctgtgccaaattttaaatactgtatatttaaatatatatttttatattatatactatatatataacattatgagccaccaaacccaaagaactataatgaagagccaaacaaaacaaagtggctcaggttctaggggacgtcctagggtggagaaagaggcctggaaggtgggcagccccttccatcgagggtggggcggccgcctgacccagtccacctgcaccagtggggtgtggcatcagttaagcaaaggacccttaggcctatgcaacatttctgcccctaagttagagaaccaccttttagagtggcgatctcatgggagtggcagcttgactctgcaggaaatgtgggtgctatgagtgcagaacagaaactcttacgcgttctgatataaaaacaatacatgaaaggatgtggatttagccgcaaaatcacgctgtttcaattgaataaaggcaccgctgggattcgaacccaggatctcctgtttactagacaggcgctttaaccaactaagccacggcgccgaagctgccataaaggttcctgaaattcatctacaagaatatagagctaggaacccggaccgagctttttcagatctttctagaactaatttggtaactcaactggctcttgcatcacttgtccattcctcggatttccttcaatgtccaaagacgttaatcatagatttcaaaccaaaatcatagactctaaatcaaattctcgattctagagttcctagatgagaggtttggagggtgccgactggatcatcccatcctggagagaaatatggtcagtatgctgaagaaaaaaatatgacgtagtcggcaggattcgaacctgcgcggggagaccccaatggatttctagtccatcgccttaaccactcggccacgactacgaggcttagggcttcgttttcatccaatgcctttcttacttcccttgactgacaaacatctgcctccatgaaagcgcttcagggaaaaaaagacgcggcggttgcacgtgaaccttcctttcacccgggtgcccagagactcctccctccaagccttcgggagcgctagtgattcagggaataggaagcagtaggtgcaatataattctgttaccagaaggcaactggctccgggtagaaacttccggataacagcagagggtcagaaaacaaaacacacacaaaaaaaagccacccactggcccgtacggggttcgaacccgcgaccttggcgttattagcaccacgctctaaccaactgagctaaccggccactaactttccgggtctacttcaaatcttaatatagggtattgctaccataaaagcagcataaatcccaacatatgggtttaaccacgctctaaaggtctcccaaacacgaacaaatcctaacagccaggaagaaatggcctcccagtagctctgaaagatgtgcctcagctcatctttccacctctccatctatcagtccccagtaaagaaatgcagcaacaccagccaaaggcattggtatctccaaagaattgttcctagatcccctaattgtacggttgtgatttcggagcaccttctggtctcaaggtatatcgatcaaggatctgccttaggccaggcccttgggaaacctacagggctaaccgtagcctggggccctatagcacagtcacccagagtcctcacctgcccctgcttgtgcctggcacttgcctccccctacaccttctttgtgcttgtgaacacctctaggcattcatatttgacttcctgcagggcccagccttactgactgagaccatcatagctatgctctctgccttgccgccaactccccaatttacttcctttacagactgattttggtaccatttcttctgctggacgaaaagctcttctcttccaaatcactttccacctttggccctggcggcaaagggctgaaatgatgatgaacgactaggagttcctaggaggtggacaactaggagtcaggaggcctgggaccccagagatgagtaccagtgagaaatgacaccagagggcttcattgcaggtcaataggcctgtcaccatcaccccacagcgagcaagtcttttgttccctcagctcctgcgacaaagtcagaacccaggtgctcagggccgcctgtgaatgcaggtgccttgtcccaatcagaggacatattaatagggccatgatttcctgttgccacaattttgccaaggcaggctggcaccagaacaccaaagaagggaaattatagtggagtagcagtttgtgaatctggagtccttggttcaatcacagaacaagtagggagaggagccaggacctaggccttcaggttttcagcaaggaaggactctcaggccatccttgcagttcagttaacaggaggaagcaaggatccccagagagctggagtactctgactctcggatagaaaggcaggacaatcggagcctggggttcacgtgagtcaggaaagggagctctccacactggaatcgctgtagccgaggaggttctgaggtgggaagagaggaaaaacacacgtctcaggcatgtggcttttagttcccacccaccattctcctccctaactccagaaattccccatcagtccctcatccctcttcctcccagggacccatctatctctatcaccatgatccccctatcatcatgatccccccgtctccaaccttacctaatgggacgatcttcgacggtttcctttccagctcaaaagaaagcacaataggacggaggacagaggggctagtacaaagtgtccagaggaacatggtcatgggctcgtcaaccctggctgaagactagaaagagaaggtcaaggttaactggctcctaaaccctttgccaaaagcccaggaatttgggtatccgagtccctccctcccagccacattacacctcaagttgggctccaggccctgcaaactgcaagaccactctgcctggcacttggacgaaatctaggagggaggcccactctctaggacacagccctagtgctgctgccacatggtgattcctacaggtcaccacggcttcggcagtcccatcctccaccaggagcctatggggagcaggaggaaataaaaacgcctatagcaacccaggttgccaacaccctggacccaacatgcctccctccccgctgtctgcagtctttggctcacagatttaggagcttaccctcattcattcgttcaaaaaatattaagcaattctcatgagccaggaattatgctaatgtagaaactgcagatagacaaagtggtctcataagtaaatggcacaatgggtgcacgccttgtgctctcacctgatgatggcctggcttatagctgtctgcgtagggcaagtggagcccaggcgagtgcactttccctgggatgaagacagtggttggaaaagtcctcttggtcccatcacatccctctggcactccatactcagttcagcctgttccttccctcccttacctgccggcagatgctggtacaataagcacacacccagaagagctgaaggctgaagacagagacgatatggcaagaggcagtggcctggaatggggactgaccaccctgcagaagttcagccaggtagatgtggggcaggggaatgctaaataaatacagggagacagagacaggggtcaagataacagaacaggcaaaggggttctgaaagcagggtgggtctagaaggacttagagggcatcaggatggggacagcagtgggttccatgcgctcctagaagccccattttaattcctgatctctgatagtcattggttatttttcaggtttgaacaccatgatgttagccaagaaatatttgcatgttaagactgaaaagccttcaaaagcctagaacactaaatgattctgggtacaatgatagacacagagcattttttatttggagtagagaagctcctctgactcaacacatcttgttgggattggagaagactgtaatgatggcaaaatcttcagaaccagggacatgtgggagatgcagatgtgaagccaggaagtttaggggttggggtctgggcactgacctgatggtggtctcagggggaaaactcaggacctgcacataagtggatgaccggaaacaacaataaacattgtgagatctgcaagtggaagaggaatagtgagtgaccaggaagacaaggcaaattggggtagaagctgggactcagagatcaagcaccacagagtggccactccccctgagggacatatcctagccatggctctaccaaagctaggggaagactaggaggaggaccagcctgcaacacctcgtgagggtactggctgggcacaaatggcagactgatatatggaaacctgtatgaaagagaaggggtcgctgcagcaaagttaagcaggggtgcacattccagagagccacatcagtagcaagaggaggcaggtgacactacacatcttcacctggaaacccttttctccaactggctgaagtggacccgggctcctggaagtagtcctagtgagggaggcaagtgtgggtcttctatatatacatccaggtgaggggggaattcacattcagcagtctcaagagcgactgttagcttcacacaccttctcatggcccccgtgttccctatagaaggaaggtgggtgttagtaggatctgtgaagtccacaaagtcccatcactctatttcataccttccccacaaaggaagggtcattacccagtttcatccagagagacgccacaaggggttcacatagtgtccgtgacaaaatctcagcggagaaagacaccaaggaatctgtgaaactggaaggtcagggaaatacactgagaatggaggcacaagaaagcacagagtggagacagtcagattcaaggcagaaaatggagctaaagtatctgctagaacttcatatataaagtcctgaaaaaacctgagctctgccacactgcacactaagagtaacagggcctatgggaaaaagagggttgtggcagatcattcaaaacccgcacaaggtggctcacgcccctaaatcccagcactttgggaggctgaggtgggaggctcacttaaggtcaagaactcaagaccagcctggccaacatgacgaaaccctgtctctactaaaaatacaaaaaaactagctgggtgtggtggcgtgcacccctataatcccagctatttgggaggctgatgcaggataatccttcgaaccagggaagtagaggtttcagtgagctgagatcaggccattgcactctggcttaggcaacagagtgagactccgtctcaaaaaaaaacaaacaaaaacaacaataacaaaagaaatacctcctgcagcagaaaatgaagtcttcaccaaacccagctagcttgggagaagagagagtggccaaattaaccagaggggcttggtggacatttacttgtcactgagcaggtcggtcagtgaggattcaggcaatgacttgtttgcatccagcacatcttggatatcctgggagctttcaagctccagagtccagttgtcctggacagtgaggcaggatgcacagccagccaactccagaggacgccgagatatgcaggatgaaccatccttttcaaacaacattggtgtctgcacggaaatgggaagacgactgcctgtgagtgtgtgctagtccagtgggaggttcacaaaacattctgacccaattttgttctttctggagcatggagaaggaagtgtgtcaacacacacaggctttctggtgtatctaaatccagccttcttccaggaggcctagagaatgaccaggcactggcatgccctctttagaccccaaccccaaaaaagctttctggggaaaggtatgatgaagtaggacactcacagcggggccaggagctatgagtcggtacacctgtcccgggtgcaagaactcaaaccagcggactgaagagccaaagaaaatgaggtgaacctgggaggatggagagcaaagtgctgggatcctagccagaggctcagggcgcaggtcaggtcctgggtccctggagtcccagtttaccttctgatcattgtcgtcatttccctggggctcgggcagcccccatccagtaccctccttcctctgggtgcccccaagccagctccccaacacatagaaactgagggcgggcttgggcacctctggacttgctcctggggggacacaaaaattacgcttcatgagggcctccttgtggcagagcaagaagagccggctctgtcctaggtggggtccctctgggccggtgggatctgtctgaggtgttgagggtgttgctgaatgaaggcagggtctgggcacaggcaggatcagggcatcagccagaaagaactggacatagactctgttgggagagacaaggaatacatttcttagtgatgcaggcattgggtattttggtccccagcatcccactccttccaccaggcccttccttccccccagactcaagacaaccatgaccccaaggagccaacctggcctgctgcttctggatgaagcctggcatgctcagctccttccaggaagggaagctgcttctcacgtccctctctacgatcaactgaaacctctctgcccgcaccaggcagcctagaggaagaaagttttctgttttgacaagaaaggagacctgtggggtgggttgcaaggcaaaccatcctaccggcctcactacccatcccaggccagagctgctgccctcacatgacatgaaagcccacacctgacccccaccttagaggggtgacaccttctctccaaactaagaatgtaggagacacagttgtaatcctggagtgcatgttaggagctacggtggagaaatgcatgctggaaattctggctaggggtcctcttgctcctgttctctgcctgccatacaagtctcccagaagttgttgattgacatgtgtcacttctgcatctctagtaaatcccagcaggcttttcctcccaggctcccctggctatgagaaccaccatcccactaccatcttctttccacatctgaactccaaacctatcagccgtgggtcactgaggggttgagagtgcttggccaggagcaggcagggcagggaaccactttggtcccgaagttgcagacaacctttatgagatgaagccaccagaaccccaagtaaaacctgcaagaagatgaaggttgagttatcaaatgtttattcagcaaatactgagcatctactatttgccagatgctgtattacatggtaaagctacaaaatgaacaaaaaagacacgtctctggcttcaaaaaacttatattcaagtggggaagacagacataaaaaaacacacacgcattcacacatttagtaggagaagagaaagcgcacaaatagaggttacaggtaagaggccatgcgggatctcacaggacacaatgagacgtttgattttactttatatgcactgggaggcacgcaaagaatttaagctggggcgcagtggctcacgcctgtaatcctagcactttgggaggccaaggcagaaggatcacttgagctcaggaggtggagatcagcctggcaacatagtgagaccccatctctaaaaattaaaaagtgtaaaaattaacccaggccaggtgcagtggctcatgcctataatcccagcactttgggaggctgaggcaggcagatcactcaagtccaggaattcgagaccagcctgggaaacatggcaaaatcccatctctacaaaaacacaaaaattagctggatgtggtgatggatgcctacagtcccagctactcgggaggctgaggtgggaggactgcttgagcccaggaggcaaggttgcagtgagccaagatagtgcctctgcactctagcctgggtgacagagcaagattctgtcccaaaaaaataaaaaaataaaattagccagggacggtggtgaacgcccgtagtctcagctacttgggaggctgaggtgggaagatcactggaacctgggaggtcgagactgcaatgagccatgatcgcgccaatgcactctagcctgggctacagagcaagatcctgtctcgaaaaaaaggatttaaacaagagagttctgtaatacaagtttcacttttttttaaacttccttttttttcctgagtcttgctctgttgccccggctggagtgcagtggtgtgatcttggctcactatactcttgatctctcaggctcaagcaatcctacctcagcctcctgagtagctgggaccataggcacatgccaccgcacctaattaagacaacttttttgtagcaacaaggtctctctacccaggctggtctcaaactcttgggctccagtgatcctcatgccttagcctcccaaagtgttgggattacaggcatgagccactgtgcctggcatatccccatttctagttgctgcagagagaatgaattggagggccaacaacagatgaagtggtctgcttagaaggctagtgtagtcaaaatgacgaagaaagatagtaaccgagactagagtcgtggcaataaggatgacaaaaagggaaatcacctgagccctgctagggtcccccttacctgggctgggcagaaggcagagggcagcagacagagccaggaccaagccaggcggcgattgagttggcagctgggcaggtaggaggcctccgggaggggcagaagggccttagggtcaaaggaggcccaggccttacgctgtccttcttctttcagggtggccagagtggggaaggaggagggagtctgcagccgagtgtactgtcaaggagggaagagaaatcgggtgtgtgtcccatgggccccaggtgtcctccagtgttctgccaccatccttcccccacatcctcatactttctggaggggacagtgatgtggctcttcaaggatctcattgtgtgcattccgaacagggctgcctggcggagctagaagatccagggtaggagccaggagttgcagtcccaggctggggctcccaggagaggaatgttgcaggaactggtggtgtctcagcacatggggacacagccttggccaggaaaagcagcacagtcacttcccctgaagagcctgcctcttcaagaatcctgctctccttgccaaggaagtgtgctactcccactgcctccccgccctgggccctcagcctcctcacttgcaggccagctcctccagggccttggtagcccacaggtagaggggaagtcctaactgacgttcccacaccagctgctcgtacagggaggccccgtaggcttgacgggatgagtgagccccaggcttctgacgagagaagctttgaagcagaacggcgccacggaggcagggggcgagcactggccttcttgtcccccctcccactgactggagcaggtgaacatcctggagctgggggaaagcagagaaaatgaaaaagcagagatgaagaccccaactcaatgaacccaggcagagttaaccgcactttgccactgcctgggttccaggaagacggaaagcaatttctcccacgtgggctggcctcactttccattacaacccactcccgctgcggtcagccttcatctcccatgagctccactcagtcttgctgtgggctgggtggctcctggatgaacagacatggctgaggcttctcaccgggtcgcctgagatcaccccagccccagatctgtgcttcagctatctcctcctccagctgaaaggcccttctgtgaaggagatgctctggccacaactcctcctcacagtgcccaagactctactcctttttatttaagcttctgtccaagttatccttagcaaaagtgccccctaacacacacttttaatttctatatttctatataaccaccctgctgcagaaaaggagcctatgaaggtaagagaagctgcagaggtctctttttgttatcagccctgatctcacatacctgcagacacactccaggtcgcatcacccgcctaaggccacggaactgctggtaggcaaggcagagccccagctgcccatccagctcatagaggccagcgggctcattcaacacgccagtgactgctccctgcaaacaggccgaggtccagttgaccactattttcttcctctttgaaaacccacatttctggcccctcaagctctaggatctctccctgtgctcaccgaataggataggagtctagaataccggacaagactttctggatccttcttgtcctccgagttgctgggcatggggagtggcttggggtcagcctctaagaggggtccttccagctccagttccagctcctgcacacattctggtttcagcagcaacagacgggaggactgactggtcatccaaacatgctggcgctgaccacggatcttggacactcgcagttctgtcagcacataggctgtaccaggccgaagggctctgtgccacaccagctgggcagggacctggcttgtgcagagacaggcaatgtgacacaagagaccccaacactgccactctgccagagtccttttccctcacgatttgaactcagagacctgccctctgtgagtctcaactcacctctccatcttccctatgtctgccaactaaatcttagcgtctctcctctctcacaggagatgccaaatatttccaaaccacttccccaacatacaaaccatccctaaaacttccttcaaaatacataaatattccactgagaaaactgtgccctatcccgccccataacacacaaacaacattcattcatgtaatcaaagtgtattgagtatatatgtatccagtattgtgactgatgtcaagggaagtatgacaaactgttcttctctaacacagtaaggccctatttctacaaaatacatatatttttaaaatttctataaaaaggaaaagaaacattattcagaaacttatatgtcataaaacaatggttagaataaagatcaatgatttacaatttctaccttgggtactatgctcagtacctgggtaaagagatcaatcataccccaaacctcagaatcacaaaatatacccagttaataaacttgcacatgtacctcatgagtctaaaagttgaaattataaaaataaaattgtaccagttgatgcaaaaagagtcaacagtaagtaccaagttttttttttttttttaatgcctgtattcaatgtctcaatggtgttaagatgaatgatttctttggtcatctccacaagtgagcgtggcagttttttaaaaggtcacatacaatctaaaagctgtgtgctcaagtgagttgcacagcgggaaagtctactccctaactctatgcacaaacatttcccggaatcttctcccaacagcgctattccagaaaacagctctccccagctgtcctcctttcctacatggctcctcctatgatgctatctttcctactgaaagttctaccaccctcccccacttccatggctgaaatgaccccagtcctcacctgcacgatgatggacacgtgggtgacagctgggtgtgatctaccaagagacaggatgaagtaagctttctgtttacttttcaccagagcactcaatcgaactagactcccagccaggtttcgctgcacacctctgagcttgtttctaagaaggaagaaaaagccctgtaatcccagctactcaggaggctgagggaggagaatcacttgaacctgaaaggcagaggttgcagtaagctgagatcccgccattggactccagcctgggcagcaggagtgaaactacgtctcaaaaaaaaaaaaaaaaaaaaaaaaaaaaaaaaaaaaagcagcagcagtcatctttatttctcttctttttccctataaatgctgtcccttccacagtaaagaataacctggtaatgatacaaaatgtccatagcccaaagcaagctatgctaaaaaccttcaaaattctctttcccttaggtaaggcacagatcccttgaacaacccttctctttaccttcttaatattcaaagcccaccattcccttgatttggaacattcagtctatattactatcaatgcccttttctttctctccctccactgacccagcatcatccttcagttttacagcgcccctgccatgcctagagggggaaattacctgagcctgagcaggcaggaagcactctctgggtagaggacagggataggcgtgacggggccaggactgatggtcaaaggaaacactggcacaggggcatcccacagctccaagtgcccttcccctgaggaattccacctggcaggagggaggtaactccaacgggggaacagaaaaagatggcccaaccaagaaaggtccaggtctatgagctaagaaagaccaagagcaagggttaatcagaaccttagcatcctatccacccacctccccgtttgtttcctcagagacttaattgccttgatccttggacaccattcttgtcaggatctgaggcatctgatctccaccttccactcacctcacagctcaggacgccagtgttatctctcacatagaggcttccgttcctgcactcttgttccaagtctgccgataggtctgttagtgtccctaaaagtaacagctgctctcggggcagggggttcccatttggtccagcctcttgggcccaggcctggtatgcactactgctccacgacaggtggctgcagcatgggagacgctggtgagtcttgaggtcctgtactgagacgaagctgtagagtgaagggaacagaggtcctgcaaagccaggtccaagcctactaaggcaaccctcaaccctgataaaccctcaagagcccagggaaaggttgcagggaacatggactaagaggtgagtttgattgattaaaggggtaaaacctggggctaaaggcctaagaaaataaggatggggccgggcgagtggctcacacctgtaatcccagcactttgggaggccaaggcgggtggatcacctgaggtcaggagtttgagaccagcccggccaacatggtgaaaccccatctctactaaaaatacaaaaaattagccgagcatggtggtgtgcagctgtaatcccagtttcttgggatgctgaggcagaagaattgcttgaacccaggagatggaggttgcagtgagctgagatcacgccactgcactccagcttgggcaacagagtgagactgtctcaaaaaaaaaaaaaaaaaaaaaggaaaaagaaaataaggatgggatctgagtccaattccgtgctgaatagtatcttcaacaagatggtgccagggagaggacccagagaaatgaagtaggaatgcatgaggggcctgaggaaatgaatgtgtggggagaacactttgtaagtaacaaaggcaattctcttgaaagcatctcagctcttaactccagagagaacttaatgggaccacgtaggcatctaacagtccaactacaatgaccccagtcaagctcctttctagtctagaatagcacagtactagagactaggggggaagctgaggctgagatgtgggtgttggatgtgatacaagtaatggttaaattatcaacgttgtgataaattcacctttttgtaataccattattctcgcttgcattcccctgaattttttttttttttttttagacagagtctcactcttttgcccaggctggagtgaaatcaagactgaaatctggaaccctctccagatggggtttcaccatgttgtccaggctggtctcaaactcctgacctcaggtgatccatctgcctcagcctcccaaagtgctgggattacaggcatgagccactgtgcccggccccatgattttttttaagtggaaatgaaaaggatcgagttacaaaacatcacaattaatcctccctgttggactcaagaacattatacacaaatgagtatcaaagagagagaatgctgttctagaaagccattccccttctgcatctgctctccttccctgacagctttggagaagacacaaggcaaagacagaaactaatacctgttggcccctgccatgcacgctatactatactgagtctggtcaggcacaacgctgaattttcttcacctcaaaaccctgtaaacaccaccaatggggaaactcagaggctcaggtacacagaggcatgggtggcaaagctagatgtgcctcattcaaaagtccatgttctttctctgtgttttcctacttatctgaaggcccaggaaaaagcaaccagagagaactgtctcttttttttttttttttgagacagagtcttgctctgtcgcccagactggagtgcattggcgtgaactcggctcactgcaacctccgcctgccgggttcaagcaattctcctgtctcagcctcccaagtagctgggactacaggcatgtgccaccatgcctggctaattttttgtatttttagtagagacagggtttcaccatgctggccaggctggtctcgaactcttgaccccgtgatccacccgtctcagcctcccaaagtgctaggattacaggcgtgagccatccattgcgcccagccaaaaaaagtaatcttaagtgttatggacgtggacaagaattataggaaaagaaaggaaaaacagtccagtgaaataaaatgataaaaaggaaaaaaaacaaaaccgtgtacaagtaccctcagaaattactttggaattaggccaagcgcagtggctcatgcctgtaatcccagcactttgggaggccgaggcgggaggatcacctgaggtcaggagtttgagaccagcctggccaacatggtgaaaccccgtctctaccaaaaatacaaaagtagccaggcatggtggcgagtgcctgtaatcccagctattcaggaggctaaggcaaaattgcttgaatctgggaggcggaggttgcagtgagcagagatcgcgatattgcactatagcctgggccacaagagcgaaattccatctccaaaaaaaagaaattactttggaattaatgtaacaaaatatcatttaatgcctaccaaatagggaaaaataaataaaaataattttttaaccaaggtaaacacaggctcaagatatgcatatacactatgggccgggcgcggtggctcacgcctgtaatcccagcactctgggaggctgaggtgggcggatcacctgaggtcaggagttcaagaccagcctggccaacatggtaaaaccccatctctgcaaaaatacaaaaactagccaggtgtggtggcaggcacctgtaatcccagcttcttggtaggctgagacaggagaatcgcttgaacctgggaggcagaacttgcagtgagccgagatgatgccattgcactccagcctgggtgacagagcaagactccatctcaaaaaacaaacaaaaaaagaagtataatgttaagcacaaaaagcaggcaggggctgggtgcaatggttcacacctgtaatcccagcactctggaagaccgagacggcagatcacctgaggtcaggaattcgataccagtacggccaatggtgaaaccccatctctactaaaaaatacaaaaattagctggtgtggtggcgcatagtcccagctactcaagaggcaggagaatcacttgaacccaggaggcagaggttgcaatgggccgagatcatgccactgcactccagcctgggcaacagaatgagactccgtctcaaaaaaaaaaaaaaaaaaagcaggccaggcacggtggctcatgcctataatgccaacaccttgggaggccatggtaggaggactgcttgagcctgagggttcgagaccagtgtggcatgcacctgtggtcctagctatgtgggaggctgaggcaggagaattgcttgagcccaggaggtaaaggctgtgagccatgtttataccactgcactagagcctgggggacagagtgagaccctgtctcaaaaaaaaaaaaaaaaaaagcaaatcacggagggtatttacatagggtacggtaccatttatttaaagtctacacttatgcaaaactctacattatattgcttaaggatagatgcatgtgtagtaaaactattaaaatatttattggaataatatatcccatctccaagatagtgattattattattatttttttttaaatatggagtttcgctcttgttgcccagctagagtgcaatggtgcgatcttggctcactgcaacctccgcctcccgggttcaagcgattctcctgcctcagcctctgagtagctggggattgcaggcgcccaccaccacgcccggctaatttttgtattttttttagtagagatggtgtttcagcatgttgggcaggctgacctcgaactgccgacctcaggtgatccacctgccttagcctcccaaagtgttgggattacaggcatgagccactgcacctggccaatagtgattacttctatgaggagataaataggtttcttttgcaggacttgtcatagcctctaatatgttaataaaccctatgactctcccagagacgtttatcatattcaatgtccctcacacttacttagctatgaaccccttttcttgtgctttactaacgttgcctagaacacttttggaaatgatagtgtagagagaaaaaaaaaaaaaaaaaaaaatatatatatatatatatatatatatacacatatatatataaacacactctcggaagccctaaaactcacatcttaaacacaatgatctgcacttggtaatgtcaaacagttctctgtatctttgtttcccaatacacaaaataaagataacaccagcctctttccccacttcgagagttctttttccaaattttctttctctcttcccctcttcctctctttttctttaatcttaagccaattcaggagaactttaggaaaaggaaagcttgatagtgttagaaaagctctgcagaaggggtatgtttagactaccttgtcctccgctcactctctcacttgccctttttctaattatagaaccttacttttcaatcctgaattcaatacctgcccctgcccagcccccgcaaccgccacctctccttacctatagctgaggggcagtgtagaaccttggttccttccctgggacaaccagacagtcttcacacaatcaattaccaatggagtcaactggacattaggctccttgacagctggacacagggtcttttggatgaagacctgagcatcctcaagccaggcttgttcctgaggaaagtgaatttagttaaaacatcttgactatccggcccaccaaggaaacttgggaagaataaaggactagaaaaaaatatccgggccgggtgcggtggctcacgcctgtaatcccaacactttgggaggctgaggcaggcggatcacttgaggttgggagttcgagaccagcctgaccaacatggtgaaaccctgtctctactaaaaacacaaaattagctgggggtggtggtgcacacctataattccagctacttgggaggctgaggcaggagaattgcttgaacccaggaggcggaggttgtggtgagccaagatcgagccattgcactccagcctgggcaacaagagggaaactccgtctcaaaaaaaaaaaaaagaaaagaatatccagagggcacatgaaatgaagatcaaaagtaaaggaatttagaacttgaagaaaccttaaaagtcttagtccagccataccgtagacagctggccatccagctttggtcttgcccctttctctaacaaacttgtactcatgccatcttacatggaatctggttctaaagtcagtacgttgaagaccaagaatggacaaaaacattgttgaacaatcctttaaaccgttcataaagaacaggacaggctgggtgcagtggctcacgcttgtaatcccagcactttgggaggccaaagagggtggattgcttgagtccaggagttcaagtacagcctggacaacatggcgaaatcatgtctctacaaaaatacaaaaagccaggcgtggtggcacatgcctgtgcttccagctactcgggaggctgagatgggaggatcacctgagcctggggcggttgaaacttcagtgaacccagatggcgccactgcactctggcctgggtgacagagtgagacactgtctcaaaaaaaccaaaaccaaaaatgagtaagacatagtgccatactatgtataagtgcctaatagtggacagtacataaaaaggacataggcagagtataatttttaatcatctcctttttttattcaaaggtatgcatttcccacaaactaaatatatgcaagatacaacctcacttgatttgtttcctgttgtcttttcagctaaggtgtgggcttcctgaggaggatatggactatctttgtatacctgacacagattctggacacacacttgccatgatatgtagataactttagggaaaaggaccagtttggcctactcccagtgctaggcagctttaacacacttggcagtaggccctttatccttctcccttaatgctacttctaagccattacagctccttccctggtcctccaatgctcatatattaacatcctggtcaatctttcacattcctctttttttttttttggagacggagtcttgctttgtcgcccaggctggagtgcaatggcgcaatctcggctcaccgcaacctccgccttccgggttcaagtgattctcctgtctcagcctcccaagtagctgggattacaggcatccaccaccacacccagctaattttttatatttttagtagagacgaagtttcaccatgttggccaagctagtttcgaactcctgaactcaagtgatccgcccgcctcagcctcccaaagtgccaggattacacacgtgagccaccacgcctggcctttcacattcttctaatcttaaggagctcgaaaagagctagaaaagccagtcttccatggaatcaacctaaatgcacatcaacagtagactggataaagaaaatgtggtacatatacaccatggaatactacgcagccataaaaaagaatgagatcatgttctctgctacaacatggatgcagttggagaccattatccttagcaaactaatccaagaacagaaaaccaaatactgcatgtttgttcccacttataagtgggagctaaataacgagaacacgtgaacacaaagagggaaataacagacactgggtcctacttgagggtgggaagagagagattggaaaaaatacccatcaagtactatgcttagtacaggggtgacgaaataatctctataccaaacccccatgacatgaggttacctacataataaacctgcgcacgtccccctgaatctaaaataaaagttaaaaggaaaaaaaagtcttcaagttctagatgtcttcagcatccttgtggacagccctaccactgactttcagcccacttcagccacacactcattcatggtcagagttgtggaaggcagaccaaatcaccattcagagttgccccaccagtataagcaaagttccgactctcacgctttttgtcttcctctcccagtattcttttgtagttcctgtttctcggatggcctatcctttgcttggtgcactgaatacgactgtctctcaaagtgatcccatggcttcaaggtaaaattacctaagttttgttaaaaaggcaaattcgtgttttcatctactgagtaaaaatggagcagactggatgtggtggctctcgcctgtaatcccagcactctggggggccaaggtggatcgctcgagcccagtagttcactactagtctgggcaacaaggcaaagacccgtctctacaaaaaagaaaaattagctgggcatggtggctcgtgcctgtagtcccagctactcgggaggctgaggtgggaggatcacctgagcctgggaaggttgagacccgcctgggcaacatggtgaaactctaaaacaattcaaaattagctggattagcctggcgtggtagcacatgccagtagtcccagctacttgggaggctgaggtgggaggatcaccttagcctgggaaggttgagacccgcctgggcaacatggtgaaactctaaaacaattcaaaattagctgggttagcctggcgtggtagcacacgccagtagtcccagctacttgggaggctgaggtgggaggatcgcttgagcccagggaggttgaggctgcagtgagccatgatggtgccactgcactctagcctgggtgacagagtaagaccttgtttcaaaaaaaaaaaaaaaaaaaaaaaggagggaggaagaggaagatccagattaatacaggctgaagtttaagaacacaatatgctttcccacaattatctcaaccactgcatgggtttaacagccatggccagatgatgattgttcctgtatgtctactttagctgagatctcattcctgagctttagtcctatccatctgccagactctccatggccaatccacaggcagcacacatgcccaacactgaactttccacaaaaccctgtccttttctagaactcttctagtgttatgttcactaacttagcaaatagtacccttaaccaaacagttgttctatcctgaaacctagatgtcctccttagctccttcctttccctacataggtcccagtcctggctgggtgcagtggctcacgcctgtaatcccagcagtttcggaggccaaggcgggcagatcacgacgtcaggagatcgagaccatcctggctaacatggtgaaacaccgtctgtacttaaaaaaaagaaaaaaaatacaaaaatgagctgggcatggcggcgcgtgcctgtatgcctgtaattccagctactcgggaggctgaggcagaagaatcgcttgaacctgggaggcagaggttgcagtgagccgagatcgcgtcactgcactccagcctggtgacaaagctagactccgtctcaaaacacacacacacacacacgcacacaaaccaatcctttagattgtattttcttaacatcttatttatttatttatttatttatttatttatttatttatttatttgagatggagtctggctctgtcgtccaggctagagtgcagtggcgcgatctcggctcactgcaacctccacttccgtggttccctgctcagcttcctgagcagctgggattaccggcgtgtgccaccacacccaattaccctcatgttaaagtcgctgcttagcaagaggtacaaaactgtcagctctgacccctccaccaccacccaactgaacttttgagtttttcagacacctgctctatcctcctgcctttgaatatgtgtttgcttccgtcctgaaaccccttccggcgcttttttttttttttttttttttttgacagagtctcgctctgttgcccaggctggagtgctgtggcacaatctcagctcactgcagcctccgtctacccggttcaagcgattctcctgcctcaaccttctgagtagctggaattacaggtgcgcgccaccacgcccggctaatttttgtatttttagtagagatgaggtttcaccatgttggtcaggctggtctcgaactcctgacctcaagtaatccgcccgcctccgcctcccacagtgctggattacaagcgtgagccaccacacccagcccctttcggcgctttttgccttctacacgcacttcgggtctcagacgcttttacttattatggttgcccttttcccctacagctccgtcaagggtcttctccaggaacccacagccccatagttcccccattaacctgctcctggtttcccaccaggattaaaccctagagagtgaacggagaccagtttaaggctcacagcgggcgccgcgtgaatgagggaataaacattcgcagaaccagtaagaggtaggagcggaccgactcacaaccccctcacccatgggccggacgcggccagcgagcccagagagacaaggcagaggaaataggaagagaaagagtatctgtgacaaacaagaaaaaaggaacaagagacgtaatagcagcactcacggaggaagggacctgggcccggccagccgccatgatgcgccggagctccgcccccgggaggggcaggtgctcgcttgggggtggggatgggggtgggggggcgctcggtgacgtcaccggtgagcgggtttcctcgccacctccagctccttctcgctgctcaccccctcgcttcctagagactccgcgaggcgcctcggtgcaccatcccaactcccgacacccctgtctcttttctctgatttttttttttttaagacgaagcctggttctgtcgcccaggctggagtgcagtggcgcgatctcggctcactgcaacccccgcctcccaggttcaagggattttccggcctcagcctcctgagtagctaggattacaggcacctgccaccaccacgcccggctaatttttttttttttttttttttttgtatttttagtagagacggggtttcaccatgtggccaggctggtctcaaactcctgacctcaggtgatccacccgcctcagcctcccaaagtgctgggattacaggcgtgaaacacagcccctggccctctctgatttttttgagacgaggtctcgctctatcgcccaggctggagtgcagcggcgccatctcggttcactgcagcctcgacctcccgggctcaagcgatcctcccacctcagcccaccaagtagctgggatcgcaggcttgcaccgccacacccggctaatttttgtatttttctgtagcgacatggtttcgccatgttgcccagactggtctcgaactcctgggctcaagcgatctgcccgcctcgggctcccaaagtgctcggattacaggcgggagccaccgcgcccagcctccgtctccctcctaagtgacatcctgtccggcatcccgcaggccttcagatggatggggtagcagagctcaggaactcaaacacagcccgcctggtggatgacttctaagcatctttcagtctccctgatcttgccaagcagagaagggcttcctcgtaatgccaccaaagcacaactttcacatgcttgctttatggccttaactaactgatgtcattacttaactgtccccgcggggacggggaactgaatgtattttcacaaacgtcagttcaagacagatttgtgggagaaaccacctggggataaacctctccccaccaagaacctagaattcggccgggtggctggggaaaagtgggcggggcgtagtcgccccggcgctggcaggtccagtctctgcccgcggcgcacgcggatgacgtaacaaacgcgcgcgacgattcgaggtgctctgtggccgcgagtgcatcttccacgtgagtatagttaccgcgtgcggacctggatcctcctccaggtgcagcgtttcgtcatctagcccaagcttggtctggcggcttcagtatccccaccgggccgagctgtgtctacttggtgcccgcgtatttgctttagtggaggcgtccattcgtcctatcttgcgtgcgttccgcagaccccaggcatggccgacccccatgtaaatttagccccattgtcccattcatggattcagctaacagaaagactgccggccgcctactttatatcaggcaccatgctggtcatggaatacagccctcatgcacgcaaaccctgtctctgagctcttgaagcttatattttactgggaatgatagacggaaatcaagtggcttaataaacaaaatgccttcaggaagactgtcctgaaagttggggaggggctgaagagtggtgagaatcaagagttcattaagtcattccacaagttttagaatttttttgcgtttcaagccctggtattgttctaagccttggtaattcaatggaaacgaagcagcaacatcccatgcccacgtagagattttttttctagtggggaatatagagcgaaaaataaaaacatccaatagtgataagcgctttacaggaaattaaaatagggccggccatctgatagtaactacttgagtggctagtgaagccttttccacgaaggcgaatcaccagaaatctaaataacaagagctagccatgcatatgtcagggtgaaaaaaatgccttccaggactgagcttggcaagttagagaaataaaaaagaagctaatgtgtggttggtgcattgtgggtgaaaaagagaatggtgtgagatagggttggaaaggtaggccagagagtggccagacttggtaaaccaggatgctgagttggaatttataccatgtgtaatgggaagccataatccactttatgctgatgtgtgacaaatgaattgtggttatgcagtggtcaggaggttaatgcattggtccaggtgagtgatggtggtggcttacttgaactagagtgaggtagtagagatgaagagatgagagatttgagacatgattggaaatagatttcctggtggattggatttagagagtctgagggaaagagaattaaggatgacttctgtgtttttgtcttgagcaacaaattggatgatggtagtgtttactgagtggcaagactaggggaacagcagagtttggtgagtaaagccagggtcccgctgagaggcagtgggaccagaaattggataggtagtttgggatagatggggagggcctttgaatgttaggctaaaagtattaactgtaatagttctgttgcctgatgcacactggaggtcaatacaccaagacaccaggttgcagcagagaaagaggtttaatcatagggctgctgaacaaggagacaggaggaaacctcaaatccatctcccagagtactttggggctagggtttttaaaaaagagtttggaataggattaggatgaagtgtgaaaatcattgattgaagagtgcagggtgaggtcatgaaacagggagatgaagaaactgattctcatgctcacttggttccactgtgggagtctttttttttttttattttttttaatttgaaagatgaggtctgcctggcgcagtcgctcacgcctataatcccagcactttgggaggctgaggtgggtggatcacgagttcaagagattgagaccatcctggcgaacatggtgaaaccccatctctactaaaaatacaaaaattagctggtcatggtggtgtgcacctgtagtctcagctactcgggagaccgaggcaggagaatcgcgtgaacccgcaaggcagaggttgcagtgagccgagatcgtgccactgtactccagcctggcaacagagtgagaccccatctcaaaaaaagaaaaagaaagacggggtcttgctctgtcacccaggctggagtgcagtggcacaatcgtagctcactgcagcctcaaactcatgggctcaagcgatcctcttacctcagcctcttgagtagctgggaccacaggtacatgccaccatgccccactaatttttaatttttttttttataaagacagggtcttaccatgttgcccagggctggtctcaaactcctgggctcaagcagtccactgctttggcctcccaaagtgctgggattacaggcattgggattataggcgtgagccactgctcctggcttctgtgggagtctttgagctggtggagtcagctgttctgctggaattcaggatctgcttaagcaattctttttttttttttttttttttgagtcagagtcttactctgtcacccaggctggagtgcaatggctcaatcttggctcactgcaacctctgcttcccaggttccagtgattctcctgcctcagcctcccgagtagctgggactacaggtgcttgccaccacgcccggctaattttttgtatttttaatagagacagggtttcaccacgttggccaggttggtcttgaactcctgacctcaagtgatctgcccctcttggcctcctaaagtgctaggattacagatgtgagccaccatgcccagccctgcttaagcaattctttttttttgttttaataatttatgggtcggaatggtggcgcacgcctgtaatcccaacgctttgggagtccgaggcgggcagatcacttgaggtcaggagttggagaccagcctggcgaacatagggaaaccccgtctctactaataatacaaaaattagctgggcgtggtggcgcatgcctgtaatctcagctacttgggaggctgaggcaggagaattgcttgaacccaggtggcagaagttgcagagagcccagattgtgccactgcactccagcctgggtgacagagtgaatccatctcaaaaaaaaagaaaaagaaaataaataaataaataaataatttatgacatgatatcatcaagcaataaattcttaaacaaaagctttgtgatcagagatccttttttgtttgtttgtttttgtttgttttgagacagagtttcactcttgttgcccaggctggagtgcaatggctcgatctcagctcactgcaacttccgcctcccgggttcgagtgattctcctgcctcagcctctcaattagctgtgattacaggcacgcatcaccacgcccggctaattttgtattttttttagtagagatgaggtttcaccatgttggtcaggctggtctggaactcctgatctcaagttctcactgtgttgcccaggctggagtgcagcggcttgatcactgctcactgcagcctccgcctccccaggctcaagtgatcttcccacctcagcctccctagttgctgggactacaggcacatgccagcacacccagcaaatttttgtatcttttttgagagagatggggtttttgccatgttgcccaggttggtctcgaacgcctgtgctcaatcctcccacctcagcctccaaagggctaagattacaggtgttagccactatgccccgcccaatctggcctcttcttataagggcagattataagaggtttggtgagattagtagctcattcttgagagttccactttcatgacctaattacgtcccagaggccccacctccaaataccataacattgaggattagggtttcaatatatgaattgggagggggagatacacaaacattcaatccatggctgataccatttctctcaggaaatttttcctgacacctgaagtgcaggattggtgtccacagtcccctgaccttcaccacacgggactggaaatgtctgggtacttggcctttctcccccaataaaatataaaccctgtgagagcagacagagtttctgtcttgattcacagcggtgtttctaagaccttgactggggcccagcaaagtgcatgtactccaggaacacgtgtcaggtgtgtgcctgtacacctccctaccacattaataaagaccacattttgcaagattccttaaaatctccaaggttacatttttcaggttaccttgtttctctaaatgtccatattactttcccctaccctatccataacgccgcaattttccttgaaatctgaaatcagttcaacagataggccatagttaatgttatttttattttatttatttattgagacggagttttgctcttgttgcccaggctggagtgcaatggcgcgatctcggctcactgcaacctctgcctcccgggttcaagcagttctcctgcctcagcctccctagtaactgtgattacaggcgcccgccaccacacccagctaattttatatttttagtagagacagggtttcactatgttggccgggctgatctccaactcctgacctcaggcaatccacctgcctcagtctcccaaagtgctggggttacagatgtgagccaccacgcccggcttagttaatgttattttttaggaacctaattcatctctccagcaaaggacacatctctccagcaaaggacacctctctccagcaaaggacacctgcagagatgtccccagtccttcacttctatgttcgtccctctggccatgagggggcagcccctggacacactcggaggaaactgcaagggaaactgccagagctgcagggcgtcgagactgaactgtgctacaacgtgaactggacaggttgggcccaggtattagattcttgggggacatgcctcggtgctgggggcagtgtctcaaggtgtccttgccctgtctccctgcagctgaggccctccccagtgctgaggagacaaagaagctgatgtggctgtttggttgccccttactgctggatgatgttgctcgggagtcctggctccttcctggctccaatgacctgctgctggaggtcgggcccaggtaagtatctcatcctgcccacccctttcttctgctttcctttgcttcctcttgtgatccttgggagatttgcttttcctttgctctttgctacttcctgcctaggaaaccacacatgtgctttccccatttgggtagatccctccaaagacctagcctgctccaaaacatgttctcaaagcaaaataaattagattccaagttaaaatcaaacagttttggccaggcgcggtggctcacgcctgtaatcccagcactttgggaggccgaggtggggcagatcacgagatcaggagattgagaccatcctggctaacacggtgaagcctcgtctctactaaaaatacaaaaaattagccgggtgtggtggcgggcgcctgtagtcccagctactaggcaggctgaggcaggagaatggtgtgaacccgggaggcagaggttgcagtgaaccgagatcacgccactgcactctagcctgggcaacagagcaagactctgcctcacagaaagaaaaaaaaatcaaatagttttgatgctagaggacagttttggtttggtttgagtgtactttaaaagcaggtttcttgttgcccagcctgaggctgaaagccaatggtgaggggatagcggtgggaggttgtccagacagcagtaggcaggatccaccctcccagctgaggcctgccgggggttctccagtcctaaccatcaggcccattgttcaggctgaacttctccaccccaacatccaccaacatcgtgtcagtgtgccgcgccactgggctggggcctgtggatcgtgtggagaccacccggcgctaccggctctcggtgaggtgatggggaatcaggaggaggagatgagccagagatacaagattagatcctaagctctagagagaagcagggacaggtgctcctggctttaggcctgctctgtatggtcgtacaagttgttcactgcctgaaagtacctggttgaggggtaaatggggcagaaatccagcctatgcttcctttaatttgtgcatcctggcatggattcatacctggaaagggcgtctttttgtaatctgagaaaaagtgccatatggtgtggcagtgggctagccttgcatgactaagagggtaggaaggtggaccatttctctccattcttaaactcttcaccccttgccctctgtgtgtctgcacccctagtttgcccaccccccgtcagctgaggtggaagccattgctctggctaccctgcacgaccggatgacagagcagcacttcccccatcccatccagagtttctcccctgagagcatgccggaacccctcaatggccctatcaatatactgggtgagggccggcttgcgctggagaaggccaaccaggagcttggtgagtagctggggagggagatgtagggtccaggataggccagtaggggtgctgagatctggaatgtggctgcctgagttccatagtcacctcttcctggatttgtctcctaggtctggctttagactcttgggacctagacttctacaccaagcgcttccaggagctacagcggaacccgagcactgtggaggcctttgacttggcgcagtccaataggtgaggagaaatggggttgttcccatacctgagcccatgggtgttgggagagaccacaggggctcaccttcatgttcctcccttggcttaggggcctccctgagtctctgagggcctgggctcccgtcatccatcaaggagtctacattcaaatcttggttttatcttcactttggctctggatagtccaaaatgacagaatacttgaagattatgactttttggaatatattttgatctgtcatctaagtatgaatttggctgtaactctgctgttaaatgctggtgagaagacatggcattaagaaatgaccccgtttccacctgccttcccctccctgcatcgccccctgcagcgagcacagccgacactggttcttcaagggccagctccacgtggatgggcagaagctggtgcactcactgtttgagtccatcatgagcacccaggaatcctcgaaccccaacaacgtcctcaaattctgtgataacagcaggtgctgtgccctagactgggttggcgtcaggacccggggaggggaggccccaggccctggttgggttagtgtaggtcccagaaaggaagcaaggtccatgacgggtatgtccacagtgcaatccagggaaaggaagtccgattcctacggcctgaggaccccacacggccaagccgcttccagcaacagcaagggctgagacatgttgtcttcacagcagagactcacaactttcccacaggtgagctgggttccctggagaaataggtgagatcacagaatagggtagggcaaaggtcccaggcccctggagtgggcctggggaaaataatcagggaaattggttgtccttattttcagtgggggtggtcagagatgggggtttgtctctgaggcacccagacctctccccactctctctttgcaggagtatgcccctttagtggtgcaaccactggcacagggggccggattcgagatgtccagtgcacaggccgcggggcccacgtggtggctggcactgccggctattgctttggaaatctgcatattccaggttccatctccttcctctctatccaccttcccttccagattccttgtcctggcaggcagcaaacttctatctgttaggtccatagggttatcctgtgtgccttttctcaggaggaagggctctaggatagctggcctttcactaactatggtcataagtgtagacctggggagatgaggtggccagactgcttttgcaggtctacgattttctttaaaaactagccttcattcagccagaaagcatgatattgggttggtcttatgatcagtacctgcccctcaaatctggtttcttagcctgagaaacttggctgggcgtggtggctcacgcctgtaatcccagcactttgggaggctgaggtgggcggatcacaaggtcaggagatcaaaaccatcctggctaacacggtgaaaccccgtctctactaaaaatacaaaaaattagctgggcgtggtggcgggcgcctatagtcccagctactcaggaggctgaggcgagagaatggcgtgaacccgggaggcggagctttcagtgagccaagatcacgccactgcacgctagcctgggtgatagagcgagactccatctcaaaaaaaaaaacagaaagcctgtgtaactctgattgcgagattcagagggaaggctggtgtgggtggtggaaagaagaccagtgcctcactgcaggctctagggcttcctaaagcaggacttcctgaagtggaacattgcaaccatgcaggtggtccttggtggccttgactcttcctgaaggatgcaggctgctccggcctgtcttcacagttcattcagttcatccagttctctctccttccctcccaggttacaatctgccctgggaggatccaagcttccagtatcctgggaattttgcccggcccctggaggttgccattgaagccagtaatggagcttctgactatggcaacaagtttggggaaccagtgctggctggtgaggctggggtgtggagggatgacaaacacccagaggggcttgtgggtggggtgtgcgacccaggggctgtgctattgggcgagcactgggggaactgagtgacaggtccctctgatgttcacactccaggcttcgcccgctccttgggcctccagctcccagacggccagcggcgtgagtggatcaagcccatcatgtttagtgggggcattgggtccatggaagctgaccacataagcaaggaggccccagagccaggtaagagcctgccacctttctctggatccagccagctttctccccagcacaggatggctacagggagggaacttagggaacacttcagtggttagtttttaatatgttggcttatcttatgtgtcacataatgatggacaactcattctgagaaatgtggctattaggtaatttcattattgtgcccacttcatagactgtacatacacaaacctagatggcatagcctgctacacgatccacacagcctcttactggcaatattatccaggaattttgtacacttgggagccatgatgaacaaaacagcatgagaataaaataagcacaagagaaaataatgcaatcaagacgtggtgggccaggcagggtggctcgcacctgtaatctcagcactttgggagactgagacaggtggatcacctgagatcaggagttcaagaccagcctgaccaacatgctgaaaccctgttgctactaaaaacacaaaaattagccaggcatctgccgggcatggtggctcatgcctgtaatcccaacactttgggaggctgaggtgggcagatcacgaggtcaggagatcgagaccatcctggctaacacggtgaaaccccgtctctactaaaaaaataaaaaaattagccaggtgtggtggcgggcacctgtagtcccagctactcggaggctgaggcaggagaatgacgtgaacccaggaggtggagcttgcagtgagctgagatcccaccactgcactccagcctgggcgacagatggagactccatctcaaaaaaaaaaaaaaaaaaattacccaggcgtcatggtgcatgcctatagtcccagcctcctgaggcacaagaaccacttgaagctgggaggtggaggttgcagtgagtggagatcgcaccactgcgatcgcaccactgtcaaaaaaaaaaaaaaagacgtggtaaatatgagataatatgaagctactgtcaatgtaacatggcataccgtttttaggtaaacttttttttctcttttttgttaattattattatttttaatctgcattttctttctcaagtcagattttttttctctttttagagacagggtgttactttgtcacccaggctgaagaacagtggttctgtcctagctcactgtggccttgagctcctgggctcaagcagttctcctgcttcagccttccaaagcactgggattacaggtgtgagccatggtgcccagccagaataaacttgctttatataagtagaatgagtacattctaaaataacagtaaaaagtatagttggttgggcacagtggctcacgcctgtaatcccagcactttgggaggccaaggcagggggattacttgaggccaggagtttgagaccagtctggggaatacagtcagacccctgtctctaaaaaaattaagaaataaaacttagctggatatggtggtgtacacctgtagtcccagctacccaggaggcttaggtgggaagatcgcttgagccaaggagctcaaggctgtagtgagctatgatcataccactgcactccagcatgagtgacagagtgaaaccctgtctccaaaaaagaataaaaataaaaaataaatgtaggctgagtgtggtggctcacgcctgtaatcccagcactttgggaggccatggtgggcagatcacctgaggtcaggagttcaagaccagcctggccaacatggtgaaaccccctctctgccaaaaattcaaatattagctgggtgtggtggcgcgcacctataatcccagctactcgggaggctgaggcaggagaatcacttgaacctgggaggtggaggttgcagtgagccaagtttacgccactgcactccagtctggacgtaagagtgagactctgtctcaaaaaaaaaaaaatttttttttaagtgtggtaaatacataaaccagtaatagtcatttattgtcattatgaagtattatgtagtatacatacaataatggtttgcagtatacttttgtgtgactggcagtatagtaggtttatttacaatagcatcacccaccagcgtgccacgatgccactaggcaataggaatttttcagcacaattataatcttaagggatcactgttgtatatgtggtctgttgttaagcaaaatgtcattagtcagcccatgaccaaaatggaatcatacaatatgcggccttttgtgtctgccttctttcacttagcttaatgttttcaggggttatccgttgcatcagtactttatttctttttatggctgaataatatcccattatgtagctatgtcgcattttgtttacccattccttagttggtggacattggggttgtttcagctttttagctattatgcataatgctgctatgaacatttatgtacaagtttttttgttttgttttggtttggtttttttgagacggagtctcgctctgtcgcccaagctggagcgtaatggcgctttctcggctcactgcaagccccgcctcccgggttcacgccactctcctgcctcagcctcccgagtagctgggaccacaggtgcccaccaccacgcccggctaattttatgtgtttttagcagagacggggttttgccgtgttagccagggtggtctctatctcccgatctcgtgatccgcctgcctcagcctcccaaagtgctgggattacaggcgtgagccaccgcgcccggcctatgtacaagtttttgtatgaacatatgttataatttctcccaggtatataactaggggtggaattgctgggtcatgtggtaactatgttcagcttttcaaaaaattgccaaactgttttccaaagcagctgtaccattttacattctctctggcagtgtgtgagggttccagtttctccacatgcttgacaacacttgttaatatctgtccttttgattgtaaggcataatagtgggtatgaagcagtatttcattgtggatttggtttgtttttctctaatgactaatgatgttgagcgtgttttctttctttcttttttttttttgtagagacagagtcttgctctgttactcaggctggagtgcaatggcgcaatctcagctcactgcaacctccgcctcccgggttcaagcaattcccctgcctcagcctcccaaatagctgggattacaggcacgtgccaccacacctagctaatttcttttgtattttagtagagatggggtttcaccgtgttgcccaggctggtctcaaactcctgagctcaggtaatccacccgcctcagcctcccaaagtgctaggattacaggcgtgagccaccgcacctggccgagcatgttttcgtatgctagttagctatgcgtatatcttccttagagaaacatctattcagatcctttcctatttcttttttcttttttgagatgggatctcactctgtcacccaggctggagtgcagtggtgcgatctcagctcactgcaacctccatcttccgggctcaggcaatcctcccaccttagcctcctgagtagctgagactacaagctccggccaccatgcctggctaatttttgcattttttgtaaagattggatttcactgtgttagccaggctggtctcgaattcctgagctcaagcgatccgcccgcctcagtctcccaaagtgctgggagtatgggtgagttctcccacagtttctaccctggagcccccaggcttcaggacccttccgcatccagaggttgcagtgagccgagattgcatcactgcactccagcctgggcaaccgagcaagaccccatctcaaaaaaaaaaaaagtttttagtgtataagccttacttctattgttaaatttattcctaattatttttattctttttgatgctactgtaaatagacatagatatttttgcctttttcatttttcgcttagcagtatatcttggaaataatttcatattgatgaaatcatattacttcattacattcctatattctctttttttggtggcttagtctttcattgtatagacttaccatagtttacttaatgaggtctctgttgtcagcctttaggttatttcatgtacttgctaatacaaacgttactgtggtgtttaatcttgtaagtaggtgattttatacctgtgcaaataaatcagcgggatgacttcctcaaagtgtatttacccaatcagagactgtgtgcatttgtcattttggttgttattgccaaatcgtcctccgtagttgatatcagtttactctcctatcaacccagtcaagtggtaaggcttctgggctaggcagggtggctcacgactgtaatcccaacactttgggaggccgaggtgggcggatcacctgaggtcaggagtttgagaccagcctggccaagatggtgaaaccctgtctctactgaaaaaatacaaaaattagccgggcacgatagcaggcgcctgtagtcccagctactcaggaggctgaggcaggaatatcgcttgaacccaggagacggaggttgcagtgagctgagatcacaccactgtacttcagcctggacaacagagcgagactccatctcaaaaaaaaaaaagctggtcaggcttctccctaacatcagcttcctctgtgttcacgctgccttgctttcgaggcctcttctcgtggcttccccagtgttctgattctgccttcccttcttacaggcatggaagttgtaaaggttggaggtcccgtctacaggattggagttggaggtggagctgcttcatctgtgcaggtgagtgggaattgctaaaggtgcagaatccttgatataaccgggccccaggcataggggagcgtataggagcttccagtctcgctgagctgagctatgccatatatgcccccaggtgcagggagataacaccagtgacctggactttggggctgtgcagcgaggagacccggagatggaacagaagatgaaccgtgtgatcagggcttgtgtggaggcccccaagggaaaccccatctgcagccttcatgatcagggcgctggtggcaatggtgaggaaaggagttggaacaagagactgggcctgcctggtatcctgccaggtttcgtttagggagaggtatcaggaatctccaaccaaccacccagctctgggtcccattctccatgctctgtacattctagacaggttcagggttggaagggtggaagcctgctgccgtgggatgattggtggtaagggtgcggcagcagttgacacaggaacacaccaaattacaggcccctttggaggccagggactgccctttgttgcctgaccaccactaggtcactgcttctccttgcaaccctctcaccaggcaatgtcctaaaagagctgagtgacccagctggagccatcatttacaccagccgcttccaggtgggtctcgtcccctgaagtgtgacattttcccacccctgccagccccagcccgcttccacccatctctcttgcaacaacatgagacgtgggagtgcccactggcccttctctttcctccccgccgtggctgtgcagcttggggacccaaccctgaatgccctggaaatctggggggctgagtaccaggaatcaaatgctcttctgctgaggtcccccaaccgggacttcctgactcatgtcagtgcccgtgaacgttgcccggcttgcttcgtgggcaccatcactggagaccggagagtgagttggcccagggagttgggagcaaacactggggcagacatgagccacctgggtatgggctagagggagagctgtcaagggagagagacgagaggaagatgggaggtagtggcaaacaagctgtggggaatgttggatccaaggaggggcagggactcaatatggaaaccaaacaaggagtggaaagcacatttgtgccctgatttctaggaacattccttgctggtgttcatagtctcatcccctctgggtggggtccctgtggtctatagatagtgctggtggacgatcgggagtgtcctgtcagaagaaatggccagggggatgcccccccgacacccctgccaacccctgtggacctggagctcgaatgggtgctgggcaagatgcctcggaaggtatgtggggttgaggggatgggtttttcctgtggtcctctccacaccaccctttaccctacgtgcactttgtcgcctgtgtgcccagcccgccccaggtgttcacactgcctgtcgctgtctgtgttgcaggagttcttcctgcagaggaagccccccatgctgcagcctctggccttgcccccagggctgagcgtgcaccaggctctggagagggttctgaggctgcccgccgtggccagcaagcgctacctcaccaataaggtcctccctgcacccttcctctgccccctgcctccttcctccgctcagcctcttctgccctcccacccttagaaagtgctgtgggggtttttgcctggccctgcaggaagcagcaggggcagggcagccaccctgatggcctggtctccctgctacccaccttctaagtagagctgttgtctgcattgggggaaagacaggcctcccactgccctgagtgccttgggggcatgtgcgggagctcaggctgtccctgtcccttgctctcttgctaaccccacctggttccacaggtggaccgctctgtgggaggcctggtggcccagcagcagtgcgtggggcccctgcaaactcctctggcagatgtagcggttgtggcactgagccatgaggagctcataggggctgccacagccttgggagaacagccagtcaagagcctgctggacccaaaagtcgccgcccggctggccgtggccgaagccctcaccaacctggtgtttgctctggtcactgacctccgggtgagttctcccacagcttctatcctggagcccccgggcttcaggacccttccacatccatctgtagcccttcatttcatgttgcaacctcccagtccgcctgcacccctggcctctccacatttctcttcccctctaatgctgtgcctctgccacccccaggatgtgaagtgtagcgggaactggatgtgggcagccaagctcccaggggagggcgcagctttggcggatgcctgtgaggctatggtggcagtgatggcagccctgggtgtggcagtggatggtggcaaggactccctcagcatggctgctcgggttggcactgagaccgtgcgggctcctggtgaggtgtgggagccccagggaggggaggaggaactatggagctgggttggcaactcattcctttggactcctccttgctctacagggtcactggtcatctcagcctatgccgtctgcccagacatcacagccactgtgaccccagacctcaagcatcctgaagggagaggtatggacatggccccatcctttgtgatctttgcttgtgtgatctttgtttggctcctgctttgtgagtgctgggcccccatctcaacactgggctgtggtgttttctgggactgattgtctaggtgtctcaccacatgctgggaatagcagtgctgtgagcccctcagggatgggtcctcctgagctgttcccctcccctcacccctccccgtctccccaggccatctgctctatgtggctctgagccctgggcagcaccggctcgggggcacagctctggcccagtgcttctcccagcttggggaacaccctccagacctggaccttcctgagaacttggtgcgggccttcagcatcactcaggggctgctgaaaggtgagtgaagacccctggggagatagcgcacagggtgccaggcgtgcagcaggcgttcaccatctgagcagtggggcaaaagggactccaatggacgatgtaccccagatcccctgacattctgacacacactcttgatggactgactccggaaggtggggtggggctgtcaggtttgggtcccgaggttgctgagctttcttctccttcctccagaccgcctcctctgctcaggccacgatgtcagtgacggaggcctcgtcacatgcctgctggagatggcctttgctggaaattgcgggctacaggtggatgtgcctgtccccagggttgatggtaaggaacctggggtctagtctcaggcccgggctgccttctctaccctgcagaccccatttccaatatattaaagagtggagtgccctccagtcccctttccctgagtcttccctgactagcttttctgtgctgtctctctgacagctgaactggatggaactggctgacacccaccatgttcctgactgcacccctctgagacttcccatccctgagatgtccatgatgaaacatcctcagtcctgccgtcctagccctcatcctccctgatccctaccctactctctggctgcatccctctgaccctcaccctggcccttcctgcatttccctgatcccgccccaactcccttggcccttcttgcatccccctgactccccacattgctctcccagtcctgtctgtgctgttcgctgaggagccaggcctcgtgctggaggtgcaggagccagacctggcccaggtgctgaagcgttaccgggatgctggcctccattgcctggagctgggccacacaggcgaggccgggccccacgccatggtgaggaagtgagggagagagcggtgtgcagtgggcagtcagagtggggtggccgcggtccatccctctcccactgtggagggggccatcctttctcctagcccgtgggagatttgttcctcttcctaggtccgggtgtcagtgaacggggctgtggttctggaggagcctgttggggagctgcgagccctctgggaggagacgagtttccagctggaccggctacaggcagagcctcgctgtgtggcagaggaggaacggggcctgagggagcggatggggcccagctattgcctgccccccacctttcccaaagcctccgtgccccgtgagcctggtgagggagtgtgtgcagaggctccgcgtcctgggggcactgagcctggatgcctgggcctgccctcagaaaggtgtctggggagttggggtggggaagtgactttctggcccaaagacacttattctcccccaaggtggtcccagcccccgagtcgccatcttgcgagaggagggcagtaatggagaccgggagatggccgatgccttccacttagctgggtttgaggtgagcagggtagggggcagctgggggtgattgtccagcctcagctgcgtgtcctcccacccacactccccctccccaccttcgcaggtatgggacgtgaccatgcaggacctctgctctggggcaattgggctggacactttccgtggcgtggccttcgtgggcggcttcagctatgcagatgtcctgggctctgccaaaggtcagtgtgcaggcttctgcccactcccttcccccacattcctgaagaggtgcctttagccccatcttcctgggctggggattggcctctcactccaccgagctacgagagagtgggcccattcgttctgggccacatgccaacagaaggctggtagtaaatttttaattttttcattgaaaaaaagtatatatatacacatatgtaattaaaatatatattattaaatatatattatttatatatattatttatatattattaaaatgtatattatttatatattattaaaatatatattatttatatatattatttatatattattaaaatatattatttatatatattatttatatattattaaaatatgtatatttttaaatatatatatatatatatatgtattttttgagacggagtttcacccttgttgcccaggctggagtgcaatggcgcaatcttggctcaccgcaacctccacctcctgggttcaagcgattttcctgcctcatcctcccaagtagctgggattacaggcatgcaaaaatacaaaaattagccaggcgtgctggcgggcgcctgtaatcccagctacttgggaggctgaggcaggagaatcgcttgaacccaggaggcagaggttgtagtgagccgagatcatgccactgtactccagcctgggtgacagaatgagattccatctcaaaaaaaaaaaaaaaagaaagaaggaaaggaaggaaggagggagggagggaaaaggaagaaagaaaaaagaaaagaaacagagcagttatgccccttcattcccaattcccttttttgaggtcctccatgtctcaccctgacttccctattccctgctagggtgggcagctgctgtgacctttcatcccagggctggggctgagctgaggcgcttccggaagcggccagacaccttcagcctgggcgtgtgtaatggctgtcaactgctggctctgctcggctgggtgggaggcgaccccaatgaggatgctgcagagatgggccctgactcccagccagcccggccaggccttctgctacgccacaacctgtctgggcgctacgagtctcgctgggccagcgtgcgtgtggggcctgggccagccctgatgctgcgagggatggagggcgccgtgctgcccgtgtggagtgcgcacggggaaggtcaggcccaaggaaggctgggggagggcccgagggttgggggcaagggtgggcatgaaggaccttggctctcacttccctcctccttccatcccaggttacgtagcattttcttctccggaactccaagctcagattgaggccaggggcttggctccactgcactgggctgatgatgacgggaaccccacagagcagtaccctctgaatcccaatgggtccccagggggcgtggctggcatctgctcctgtgatggccgccacctggctgtcatgcctcaccctgagcgggccgttaggccttggcagtgggcatggcgaccccctccatttgatactctgaccacctccccctggctccagctctttatcaatgcccgaaactggaccctggaagggagctgctgactggccacaggggctcacctgggccccatggcttttcacctaagtgggtcctgccccctcccccatgaccttcaggagcaccccatattatttccaaaaatatcttggacagacaaggaccaaaatgccaaaatctcagcggactcgataatctgcctgctgatgttccttctgtggctgtgtctattttcagttctgctctaacatggcatgccctttctcagcccaggaaacagcatgtggttcagagaaaagagcgacaaggaaaagttaggactcctgaggtccgaacaggggcttctgttgcccacttcacaacacccagtgatcaccggtgtgcaattgcctccttggctctgagggatgttttgcgctcccttttctcatcattggggttagcgggtgcagacaaattcagcaatagtatgcagatcagcccctcaccacctcattgttctcatctggaactgaaactttctggatttctcttgaagtgctacactgcactgaatgtaaggaattgttgcttgtggaagtttctcagcgtttctggctgtcttagggctggcctcagaacccagcattcctgttatttgcttctaaattagcagctctctttttttttttttttttgaggcagtctcactctgtcacccaggctggagtacaatggcgtgatctcggcccactgcaacctctgcctcctgggttcaagcaattttcctgcctcagcctcccgagtagctgggagtacaggcacacaccaccacacccagctaatttttgtatttttagtagagatagggtttcaccatgtctcccaggctggtctcaaactcctaacctcaagtgattcgcctgcctcggcctcccaaagtgctgggattacaggtgggagccactacagctggcccagcagctctgtttctgatagaggtggttggggctctcatccctagatcctaaccctttagtatgctggaattctactcttcacttactgcattgactgttgttgattagttattattgcaaagcactgtcaccggcctcagggagtttatgtgtaatagaattaaaaataatagctgtgtataacacttagctcaagccacgcatgtgtgaggcatttggtatgtatctgaattaattctcactaaaattcagcaaaggacttgatagcccctccccgccttttcaataaaggatgaatgaaggttgactgcattgcctggggtccacagatggtgaggggggctgggcgcacccatactacatctgcttcccgccatcctgcagtcttacttcctggaggcagtgtgttgagactttgtgctggcagctgtctgttgcttcctttgctcacaggactgtggatagaggtcccttcctcatgactgttctgttgtacacctcaagtcagttggctccctagaatgttcaacatcttgataaaaggagtttgcctgagaatggagactataatcccagatccctgagggctaggagagctgggtgggggcgctgagcacttctgtgtgctcctggtagagtagccaccctgagaaaaaactgataataatgaaacaatgttaaatgatggctatggggaaaacaactatttcagagatttttctcattgctttgcaaagcgacctaccctgagcagtatgggactcctccggatcatttttgacatttgaatgttctttcctgacccttggaaaggatatatgtatgtctttcaaatttatagtatcgaacatacaatttgggggctggtaccaagggttagatattaagtttattaagtgcttgatgcaaaagtcaaaggatggcatgggaggtaacctggttggctgtgataagtaaactcgtggattttgaagggggagcagtttctggtttgggtcgcagtggccaagtaagacccaccctcctcagacactatcaagaccaagtccactggcttttcatccgtgttttcatccagtaaccaaataaccctgtccttgctgacccccacccagctccattcccactcacccactcccaagggccctctggtgaaccttccaggctagctctctgctccctccttgccttcatggaaaaccagctatcctctgagagccacttctgcagcccctccaagtggtggcttttcttctcaaacctcaacctcacatatctcatcttccccaggctggggagtcggggtcctcgtaccactgccagactgttcacccagttcaaagaaaaccctgcccgttgcaggctcatgccattctactacatccctttcatccagttctttgtgttctactgacttccccagcgcttcctttgggagaaggtgccaattcttcaatagttgattcctctctagaaatacaatgttcctgccaggtgcggtggctcatgcctgtaattccaacactttgggaggccaaggctggtagatcacctgagtttgagaccagcctggccaacatggtgaaccccgtctctactaaaaatacaaaaattagctgggtgtggtggtgtgtgccaataatcccagcttctcgggaggctgaggcagaagaatcgcttgaacccaggaggcggaggttgcagtgagccgagatcacgccactgcacttcagcctgggcaacagagtctgtcccaaaaaaaaaaaaaaaaagaaaaagaaagaaagaaatagaatgttccagggccgggcgtggtggctcacacctgtaatcccagcactttgggaggccgaggtgggcagatcatgaggtcaggagatcgagaccatcttggctaacacagtgaaaccccgtctctactaaaagtacaaaaaaaattagccaggcgaggtggcgggcgcctgtagtcccagctactcgggaggctgaggcaggagaatggcgtgaacccgggaggcggagcttgcagtgagcggacgttgcgccactgcactccagcctgggcgacagagtgagactgtgtctcaaaaaaaaaaaaaagaaatagaatgttccagtattttagctggggttgtggctgctgaaaataaagatgacatctcccagcttccctcccagttatgattaaattgtggccaatggtagagaaaatgatgtatacaatttgcaagtgttcttacaagaagggtacattttcccctttatccattcttgcttcctattgtttggaatgcagacacgacagctggaagttcagtagccatactgaagtagctttgggaattggtaccatgcagagcaacaagataagaggaaggctcttcctcttatctacttgggaggctaaggtgggaggatcacttgagcccaggtggttgaggctgcagtgaactgtgatcataccactgcactccagcctgggcaacagagccagatcctgtctcaaaaaagaaaaaaagatcaaaggagactggttcttccaacactgaggagtgccatgaggacaagataacactgaatgtcttgagtgtaggaaatgaacttgtgtcttggtttttgcttttgtttttcattgagacagagtctctcgctctgtctcccgggctggaatactggagtacagtggtgtgatctccgcttgctgcaacctctgcctcctgggtttaagcgatcctcccaccccagccttctgagtagctgggattacaggcacgtgccaccatgcccagctaatttttgtatttttagtagagacggggtttcgccatgttggccaggctgttcttgaactcctgacctgaagtgatctgcctgcctccatctcccacagtgctgggattataggcataaaccaaagcgccagcctatcttgtttaagcactattaattttggtgttttccatcccttgtaactaaaccttaccctattcaaccactcctaactcgctctcattctttaagggtattaggccctggttccctgtcttgtgcttcacttcagccccttctgttatcctgtatccatgtcagtgaccatccaacactctgaacttttctacagtgaccttcattccacctcagctaactatcccacttggattttatcacccaggatcggctctatctccaaacttatttattcaggcgtcctgtttccaaccataaggctctatctccaaacttatttatgcaggtgtcctgtttccttccaactttttttctttttgagatggagtctcactctgtcgcccagactggagggcagtggtgcgatctcagctcactgcaacctccacctcctgggttcaagcgattctcctgcctcagcctcccaagtagctgggattacaggcatgtgccaccatacctggctagtttttgtatttttagtagagatggggtttcaccatgttggccaggatggtctcaaactcctgacctcaagtgatctacccaccttggcctcccaaagtgctgggatgacaggcataagccaccatgcctggccctttccttccatctttcttctttatccacaatactctgagatttcaaagtaattaggacctccagtgcaataattactttaccccaatccattgctccttttcttccctccttatccagcttccagtaacagcctttccaaaaccccttcacttgagctatgaccttttcatcatacccatttggcaaactcccaacctacctgctttctctgagaaagccagacagaacaggttctctcataagttcatcattaaccacgtatggggaaacagggaatgggaaggaaaaatggagatgaaaggttaataagaaagtgcccaagtgggcctttgatgatacaatgtgccatgaacccagggtcatgatgaccttagttctctaaacctgaggtctaaaagcaaaaacaatttacaacaacatacacacctagtgatcaagtccttcctttgggtttcagctgggtcaatagcgctgctcaaatcctttgtgagaggttatttcagtagcaccacatacctcccttttcagcccaagtctctgttgtactttatttttcaccattgcaatcaatgaactgtgaactgtttttgtttagagatggagtctacctctgttgcccaggctgtagtgcactagcgtgatctcagctcaccacaacctccacctcccgggttcaagcaattctcctgcctcagcctcccgagtagctgggactacagacacgtgccaccatgtctggctaatttttatatttttatttattttattttattttattatttttgagagggagtctctgtcgcccaagctggagtgcagtggcgcgataatttttatatttttagtagagacagtttcgccatgttgatcaggatggtcttgaactcctgacctcttgatctgcccgcctcggcctcccaaagtgctgggattacgggcgtgagctactgtgcccggcctgaattgtttctttgatcaaagatctgtctccctgttagtgtgtaagttccatggataggagacccatttttgctccccaccgtgtcctaatacctagcacagtgcccggcacctagtaggtgctcaataaatatatgctgaacaaattaatacatatgaatgttaaaattagtaagtattgacatacatttttttctcttaatacaaaagtgaattagtggattgggttcatgggtgcttggactttgtacaccctctcaagcatttcccctttttacctcatttgtccagttaaagtcacgagttcttgttatcaggtcaaatgaaggggactggccctgtgtaagtggaaagacagggagaaccagtaagtctcttttctttcttgagatggagtctcactcagctgcccagggtggaatgcagtggcgcgatctaggctcactgcaacctccgtccctcaggttcaagcaattctcctgcctcagcctcccaagtagctgggactacaggcgcaggccaccacgcctggcaaatttttgtatttttagtagagacggggtttcaccatgttggccaggatggtttccatctcttgaccttgtgatccacccgcctcggcctcccaaagtgctgagattacaggtgtgagccaccgggcccggcctcttttcttgcttggtttaacattttttcttttcttttttttttttcccgcttagtttaacatttgcctggcagccaacagggcccttcagttgcacagaaaaagacacatcactgaactaagcacacattactgtcatcctcagttgctagaaggagcactactggctggggaggcagcaggcaggggctaagcacagaaaaggagtgtgagtgagagcatccagatgggaccacctggtaggggccatctgttttagagaggcttcccgccagggcaccctctgctctccaacaggccagcccaccaagggacttcgttctgaactgtgtctgggacactgctcaaactagaacatagataatggagaaagactggaaagaagaggggtgggcatcagtcagtggtgagcctggtgaaggaatgtctcccacggcagctgggtggtcagtatcctggggcctggctagcagtgtgctcccagcacctgctgtatgtaagaccctgtggtggtggaaaccaaacaaaccttctgtcactggacacttgggggtggcaaacagccagatggtagagaccggaggcctgctgcagtggagcctgggtcttggcatcttgtggggcttcaggaaacctttccgtgtgagcagcccactaggaatgcctgcgacattgggccatcctcccccaagcaggaagggctttgtgcagctccctctgcctggtcaggctggaggggcagcctgcgactacagaatgagacagaacactgtgaaacagccctgcccatactgtcactcagggaacaacattgtcaagggcctcctcctgagggacacacatgagggagatagacttggaacaagtgatttcaatccagtgacttttaggggaagctcagggtgccgtggagctcatagcaggggatgtggcccagacttttgggatcagggaaggattctcggagtgagctgagacctgaaggatgagtagcagtttgttacatgaaggtgagtggcactctagaaaaacaacaatatttgcaaagcctcagaggcaagagacatggtaaagagctaaacaaaggtgagtgagtctgtctggaacatcaagtataatataactgggaaacaggacaggcaaaatcgaaggcctaacagaacaggaatctggacttgattctaagagcaacggaagccatttggaggggtttatacagcagatagatagacatgagggggtctgcatttttgagaaatcactctgagaggagggaggcaggagaggacatgggagtccacagagaaagctacacagtctccaggcagaaacagtgctagctcggactaccgtagtggcagtggaaatggcgagaagtggaaggattccagggctattaggagatagaatcaccatgaatggccaggtgcggtggctcacgcctgtaatcccagcactttgggaggctgaggcgggcagatcacaaggtcaggagttcgagacgagcccggctaacatggcgaaactccatctctactaaaaatataaaaattagcggggtgtggtggtgcacgtctgtaatcccagctgctcaggaggctgaggcaggagaattgcttgaacctaggagccagaggttgcagtgagctgagatcacaccactgcactccagcttgggccacagagcgagactctgtctcaggggtgggggtggggggaggaatcaccacgaactgggtgttggggaagaggggtggggagagaggagccagtgatgatgcccatgcttcttgcttgaaccactgggtagatagtgtcattacctgtgatagggacatgtctgggaggaagatgatgtgctttgcttacgatgtgttcagtttgaaatgtcaatgagacatgtaggtggaggcatccaggaggtggtcagaagagatctgggatggagatgaatatttgggaagcactggtatgtggatgggtaaggttatctagggggagtgtgcagggcctggtagcccaacattgaaggggttgacagaaaaagaggaagctgagaaggaatggccacgactaacccaacagtctaaccagttgagcggcttcccactgcccggcgatccaaggcaacaagagagattaggaagcaggcctgttcaccacaactcctctcccctagatcattgccaaacgcagtacaacggccctccccactcccaaacatctcacctgtggaaagttacagggaagtggccttggctaaatcaagcagatggaaagagctaaattaggctgggtacagtggctcaggcctgtaatcccagcactttgggaggccgaggaaggaggtcgggagtttgaaaccagcctgaccaacatggagaaacctcgtctctactaaaaacacaaaattatccgggcatggtggcacatgcttgtaatcccagctactcagaaaggctgaggcaggagaatcacttgaacccaggaggcagaggttgtggtgagccgagatggagccattgcattccagcctgagcaacaagagtgaaaaaaaaaagaaaaaagctcaattatgtgtctcaaaaaaaaaaaaaaagaaagaaaagagctaaattatgtggtgctttggaagctgggaccacatggactcttaagagggatggcaccttctaagaggttccaagggcggaaacaaggggcagttccactgggtttcagacacagagatcccagcctggattgtcgtggaggatgaagctgctccatcttggatgctgatccgccatgttgtcctctggttaacccctgttctggaatgcctcctctaagattgccactttatctactgtgaccttaaatcctgctcttaggtagattcacatagcattctgcgcctttccctgaggggttgacttcagtggtgccacacatttctactgaggcatgtgtaccttttgcatcaggtatatcagccctgggactcggggataactgactgacggctgcctggcttctgtttctaagttgctattaaatgtttctttctgagaaactggatacatcaatcagtctccctcttttttttttttttttcttttttgagatggagtcttgctctgtcacccaggttggagtgtagtggtggcactctctcagctcactgccacctctgcctcctgggttcaagtgattcttctgcctcccgagtagctgggactacaggagcacaccaccacacctggctacttttgtatttttagtagagatggagtttcaccatgttggccaggctggtcttgaactcctgacttcaggtgatctgccagccttggcctcccaaagtgctgggattacaggcgtgagccaccgtctctttcttcagcctctcagctcccttggcctttgggtaggtttgcatagactgcttgtggatgtggaaagtcctccttcccttggtgcctgttgtgcctctgtctccgcaggaggcccataggattctgaagagctgtgatgggagccctgcctcggctctccatcagactcaggacaggccaccagggctgctatccgtcaccacacaccacctctcccgtttgacagtgtccaaattgcctcctcttccccacttctggaatatgtgttgagagacagcagtgagatgcaggagggcgtgtgtctgtggagaagtcaaaactaaaggttgccagaatctagttggaaaaatacgtcccttgttcctggttgggagagcagtggggccatgtgctgttagctggctccaggcacagggtccttatggagaaatgtacagagcactggcatatggatggtggtccccgctgcactggcactgatgatcttatgctgaaaagggatgcatgacagaatcagaggaattggactccattgtagggaactaggggacagaggataaagtgcccaatctcgtgacttagcagcagcaaagaagagaggccctctttcctctttgccctacttacaacccaaaccctccaactctgtctttctgtcattggtgtctccattctttttttttttttttttttttttttttttttttttgaggcaaagtcttgtttggttgcccaggctggagtgcagtggcacgatctcagctcactgcaacctccgcctcccgggttcaagtgattctcctgtctcagcctcttgagtagctgggattacaggtgtgcgccaccacacctggctcatttttgtatttttagtagagacggggtttcaccatattcgtcttgaactcccgacctggtgatctgcctgcctcagcctcccaaagtgctgggattacaggcgtgagccacccggctggtgtctccattcttcgtgaccaggcttccatcttggaacctgctctacatttttcccctccaccttgtgcattgtcccatattattgttttccttctgcattgctcgtcctggcttcatctctccctctcctaactgtaacagcttagcacagactctcatccctccacacacactatacaagtctggggctgaccacccagagttagtgtcagatccctgaagtaaaggtctgagtcttccacaagactcccctcatttcagacactagtcacaaatctcaggcgtccccaagtcagccacactttgcctgactggctttatgttcagaagttcccacaatccccacaggctcaataattcaccagaaggactcacagaactcagagaagcactatacttatgattgtggcattatagttttattataaagaatatgcattggtgtccaggcacggtggctcacgcctgtaatcccagcattttgacaggccgaggcaagcaggtcacctgaggtcaggagttcaagaccagcttggacaacatggcaaaaccccatctctactaaaaatacaaaaattaggctgggcgcggtggctcacgcctgtaatcccagcactttgggaggccgaggagggcggatcacctgaggtcaggagttcaagaccagcctgaccaagatggtgaaaccccgtctctactaaaaatacaaaattagccaggcgtggtggtgcatgcctgtaatcccagctactcaggaggctgaggcaggagaattgcttgaatctgggaggcggaggttgcgctgaaccgagattgcaccattgcacttcagcctgggcaacaatagcgaaactccgtctcaaaaacaaaaacaaaaaaaaacaaataaaaatacaaaaattagccggacatgagattgtgtcactgcactccagcctgggcgacagagtgagactcacaaaaaaaaaaaaaaaaaaaaaaaaaggccgggcatggtggctcacgcctataatcccagcactttgggaggccgaggcgggcagatcacgaggtcaggagatcaagaccatcctggctaacacggtgaaaccccatctgtactgaaaatacaaaaaattagccaggcgtggtggcgggtgcctgtagtcccagctactctgaaggctgaggcaggagaatggcgtgaatccaggatgtggagcctgcagtgagcagagatcgtgccgctgcactccagcctgggtgacagagcgagactccgtctcaacaacaacaacaaaaaagaatatgcatagggaaggttggaacaggtcccagaatctgagctcctgtggggactgctgaggagtcagggcacagagcctactggcacatcaatgtgttcaccaaccaggaagcctcactgaacttcagtgtccagaattcctattggggttttattgggctgatatcaactgggccaaagctccaaccctctaatcacatggttgatctttctggtgtggctcacccccatcctgattcatgtccttagcataacctatctagaggcccaccatgagtcacctcattagtataaaccattagggcctatcaagaataacaactccaataatgggaaattccacagattttgagtttttcaggaaccaggcataaagggcaattaagttttttgtttgtttgtttgtttgttttgagacagagtctccctctgtagcccaggctggagtgcagtggctcaatctcagctcactgcaacctctgcctcccgggtcccagttcaaacaattctcctgcctcagcctcccgagtagctggaattacaggcatgtgccaccatgcccagctaatttttgtatttttggtagagatgaggtttcaccatgttggccaagctgatcttgaactcctgacctcgtgatccatccgccttggcctcccaaagtgctgggattacaggcttgagccaccgtgcctggcctttttgtttttgcttttgagacaaagtcttactctatcgcccaggctggagtgcagtggcaccatctgggctcactgcaacctccccctcccggattcaagtgattctcctgcctcagcctccttagtagctaggattacaggcacccaccagtgcgcccggctaagttttgtatttttagtagagacggggtttcaccatgttggccagcctggtcttgaacccctgacctcaggtgatccacccgcctctgcctcccaaagtgctgggattacaggcgtgagccactacgcctgctctttcatttttatttttatttttattttttttaagagatggagtcttggccaggcgtggtggctcacgcttgtaatctcagcactttgggaggctgaggcgggcgaatcacctgaggttgggagttcgagatcagcctgaccaacatggagaaaccccatctctactaaaactaaaaaaaaattagctgggcatggtggtgcatgcctgtaattccaggtactcaggaggctgaggcaggagaatcacttgaacttgggaggcggaggttgtggtgagccgagatcgtgccattgcactccagcctgggcaacaagagcgaaactccgtctcaaaaaaaaagagaaaaaaagagatggagtcttgttctgtcatccaggctggagtgtagtggtgtaatcatagttcactgcaacctcaaactcctggactcaagcaatcctcctgcttcagcttccctgggactacaggtgtgcataccaccatgcccagctaattatttaaatttttggttgagatggggtctggctacattgcccaggctggtctcgaattcctgggctcaagtgatcgtcccaccttaacctcccaaagtgttgggattacaggctgagccactgcgcctggcccagtcaagttctttattgtacaacatcttttaaaagggcctaactggtaaataacctatctcttaactgccatccaataaatacaggccaggccctgtacaagtcagtggaaagttgatggtgaaaagacagacatggacccctctctcctggtgcttagtgtgttacacagtgaggcgcctgcagtggtgacaggagcatagcagcacagcaggagccagcagttaatccacaaatgttttctggagatctgaggatgagctagctagggaagaagggggaaagaaagttctaggcagagggcatcacatgtgcaaatgcccagaggcatgaaagaggttgactcagtcaagggattgaagaaagttcagtgtctataaggagaaacagactataaggggaaaatggcagggcgcagtggctcacacctgtaatcccagcactttgggaggcagaggcgggtggatcacctgaggtcaggggttcaagaccaggctggccaacatggtgaaaccccatctctactaaaaatacaaaaattagccaggagtggtggcacatgccagtaatcccagctactcgggaggctgaggcagcaaaatcacttgaacccgggaggtggaggttgcagtgagccaagatcatgccactgcactccagcctgggcgacagagcgagactccgtctcaaaacataaaaaaaaaagactataaggggaaaatgatgggatatggggctgaaaagttgcagggaaaggactgacaggtatagaattgctccaaacacgaggacacactggtcttcctcagacactaacttcgttatagcaggcctttgtgtattgtgtatctactgtggctaccactgattgccagacaatcctaagcatctccccaaggcaggtttctcagccggggactaagctgggtcacaaactagatctcattacaggatatgaactgtagcacgccctagctcttcctgttcaggctgaaggcccagaaagaagggccatgttttacccatttttagaccctctcctaaagcctagtacagggctaaatacacaaaatacttcatagctgggtttcttagtctttagtcaatgagcttggataaaaatttcatctttctttttcctttttttttttttgagacggagtttagctcttgtcgcccaggctatgatattttgagacagggtctccctctgtcacccaggctagagtgcagtggcatctcggctcaccgcagcctcaacctcccggctcaagccatcctcccacctcagcctcccaagtagctgatactacaggtgtgtaccaccactcctggctcttttttttttttttttttttgagacagggtctccctctgtcacacaggctggagtgcagtggcatgatgtcgactcactgcagcctcaagctcccaggctgaagcaatcctcccgcctcagcctccccagtagctgggaggtgcgagtcactatgcccagctaatttttgtatttttttggtagagttggtgttctgccatgttgcgcagcctagtctcgaacttctgggctcaagcagtcctccctcctgggcctcctacggtgttaggatcacaggggtgagccactgcgtacagccatgttttcagtaaccttttaactgaaatttagcatttcctttcactgtgaatttaggtaacaaaccacagtagtattagcagtatctgtggtttcatctcaatagcagttacagatatgcttactttagaatggctgtggatatcttgaaccataatttgtatgcattgctagttttttattacatttattagagactgctgctagatctagttaatatgataacaaagaagtagacttgtactctatcaaatatctgggtttaattttcttttttattttttgagaaacagtctggctctgttgaccaggctggagtgcaatggcgtgatcttggctcattacaacctctgcctcccaggctcaagtcatcctcccaccttggcctcccaagtagctggcactacaggcatatgccaccatgcctggctaatttttttttttttttttggtaatagagacagagtctcactttgttttccaggctggtctcaaactcctgagctcaagcaatctgcccacctaggcctctcaaagtgctaggattacaggcgtgagccaccgcacctggcccatgcctgtaatctctttgagagtccaaggtgggaggatggcttaagcccaggaggttgaggctgcagtgagctgttatcatgccactgcactccagcctgggtgacagaataagaccctgtctcaaaaacacagaaaaaataaaaataataacattacaccgaataggggatcatgggcttcacaaaactgccaaagcagtccacagtagaaaaaaggacgaaaacccctgcttaatagaaatattcattgtcctaactcaaaggaatgcttgactttgggtgtggtgttgtctctctgatctgagtccatctcttggtgccctaaaggggagagtctctgggactcttgtccccatagcaaacaactgcatcaactgcatgcagggcattggataagggaatgtcccaggtgtagagaatcaatcagttgcaggcctacttgcaaccagtgggctgacagcgagccataccctcacattcgcctgagaaaagtggctgctggccttctctctactgagatttgtcccctgatacttatcatcctagccacagccagctggaccagagatctcccttgtgtttgggtggtggcctgaggagtggccaggcaggagagccggccaaataggtactttcagattgaataacaactaatcgacccagttggatcctgtcccttgggaagttggaatttgaacacttgagggagtcgacaggtggcagggccagcagaattgacaggcacacaaaaaaaaaggtgaagggagaaggggaagtggagccaagcgtggggatttgccaagtgagggtggccttccaccccattcattcagaggaggtctggctgagcagcccccaagagcccacagaattgtggagggccaggggtccccagctgcgtagggctcatgggagaacatgagacaggccagacacccaaaatgaggaagttgggggggcttttttctcagccttcctgacctggcgtgacctcctctgggcccatgtaacaggcctccacacccccttatgcctggtgcaggcaccctgttaacttctatgtccctgtaggtccctttccaaggactctacctgcttgactgctcccaaagcagccagagccagtattgcccctggtggggaatggagctggagagcaggctggcagcaaggaggagagagggacagagaggtctgtcactcattatcccagagaagcatcatggggtggactcctctgacctggctccttttgtttcccatggctggggtccttctttccctctagagcctgtaacgcccccgctctgtcaaattcctcatacagcaaacttattctactctctttacccagaaataggtcagactcaactacatccatatctgatttcttcctttgtttttttttttttttgtatgtttagtagagacagggtttgaccatgttggccaggctggtctagaactcctgatctcaggtgatccacccacctgggcctcccaaagtgctgggattacaggtgtgagccacggcgcctggccccccaacagcattttagagatgaggaaatgagactcagagaggagtctgatggctatagtaagaaatgaggagtcaagctccttagtgtgcgctacaaaaaccctgcacacctgactgtgtttgcagctccctgccacccattcccatcctaccctcccttgccaaacagatacacttgctttctccaaaatatgccctctcatctccaagtttttgctcctgatgttcccccagctagaatacccctaggatgtcctactgaattctgagtcaaactttaagactcaaagtatgggccaggcatggtggcgcatgcctataatcccatcactttgggaggccaaggcaggaggatcacttgagaccagaagtccgagaccagcctgggcaacacagtgagactccatccctaaaataaaacacacacacacacacaaaaattaccggagcatggtggtgcatgcctgtagtcccagctactcaggaggctgaggcaggaggatggcttgagcccacaaggttgaggctgcagtgagctacgactgcaccactacagtctagtcttggcaacagtgagaccgcctctcaaaaaaaaaaacaaaaaaagactcaaagtgtgctccactgttccttcagtgaggcatcgggggctgtgtcctaaatgtctttgtatctccagcccttcacattagggcctggcaaggtaagagaccaataaatatgtaccctttggcttcatttcactaagtcattagggtccagaggtatggtcagcacttggaaccctgtggaatggcctcaagatcagagtcctcttgcccaattcttggctgggaagtaggtgacatctagaatccatgagggtatgggtgatctcctgggttccagacatttgcattgagtttattcaatcacttaacaatatatattaggtctgggctgggcacgctggctcacgcctgtaataatcccagcactttgggaggccaaggcaggcggatcatctgaggtcggaagttcgagactcacctgaccaacatggagaaactccatctctactaaaaatacaaaattagctgggtgtggtggtgcatgcctgtaatccagctacttgggaggttggggcaggagaacagcttgaacccaggaggcggaggttgcagtgagccaagatcatgccattgcactccagcctgggcaacaagagtgaaactccatctcaaaaacaaaacaaaacaaaaaaacccaatatatatcaggtctgttatgctctaaacaccgtgccgggtgctgaggatcaaagatgaatagagaaatgaactgaaatgatatagtgaagttaaaacttaaagaacacaacaaatctgtaaaagacaaacaaaagagggtttaatctgtgcttctgtccaggtgtgtggagctgggggtggggttgcacctgcccgggagcattcccaaggcaaatatttgagaggaattagatttctaatacccaggttggctctcactttcaggaagatgtgagacctgaatcctaacctggacgcattgttcccctaattcccagcagcagatctatgaattagcggtctgggtggcagcccattcttctttcagaggcccagaacaccgtgaaactatgctttcctgactcaagagaccctacctagacgtgggcccctttgacgagcacctgcccctcaggagggtctcaggcgaccttcttggaaggtgtgaccacttgaaaaggacgaggaggccaggcgctgtggctctcgcctgtaattccagcacttagggagccgaggcgggaggatcgcttgagtccaggagtttgaggccagcctgggcaagattgggagacactccccaccccgccccatttctacaagtaattaaaaatttagccgggcgtggtggcgggagcaggagccactcaagaggctgaggcaggagtatcacttgagtcctggaggtggagactgcagtgagcggtgatcgcgccactgcattacagcctgggcgacacagcgagacctgtcaatcaatcaatcaatcaatcaatcaagaggaggctggcgggagcatgctcgtgaccaccgggggcgacatagaccctaaccctaagtccaaccccaaggcagaccccaccgtcccgccaggcgcactcctaagagcgcggcttccggagcaaagccgctgacccccgcccccagggtcttggcgccgattggccaacgagagcgcagggcggagccaaatcttaaaggatccgggagctaagccagacccgggtggcggtggcagctgcgaaacccagggagccgatgccacgtgacccaatgtggacttcttttaaacctttctaatgcccataacccagcctcagacccatggagcccacgagagactgcccgctgttcgggggcgccttttccgccatcctccccatgggggccattgacgtaaggtgagaaggccggggcgcccaggggcggctgactgggtgggttgtgggaagagaccggggtcaaccagggtctgcctcgcctcactccagcgacctccgaccggtcccggacaatcaagaagttttctgccatcccgtgacggaccagagcctgatagtggaacttctcgagctgcaggcccacgtacggggcgaagcggctgcgcggtgagggaatggcccccggctggccaatggcaggggcggggtcggaccagtgggcggggcccgcggccgacggttaatccgggcggtgagaccacgcacgggccgggagccaggcctgcaacttaaagatgctcccggggaggcgaccagagatgtcccttcctgaccccgcttccctactccaggtaccactttgaggatgttggtggcgtgcagggggctagggctgtccatgtggagtctgttcagcctctcagtttggagaacctggccctgaggggccgctgtcaagaagcctgggtcctctctggcaagcagcagatagctaaggaaaaccagcaggtgagggcccgagagtgtgtaatgtcctggaagggcggtagcggggacgcagagatccaggtaagcatcctgactctgatccccttaggtagcaaaggacgtgacacttcatcaggccttgctgaggctgccccagtaccagactgatctcttgcttaccttcaatcagcccccgtaaggaggaaggaacgggcgggtatctcatgactgggttcccaggagaatcgggctgggagggacagaacagggagactcactggtgggatcctccaaggaagcaggagtgggccagaggtttggggtaactgatacccaggtcctctggggaacaggaattggcaatttccaaacctcaggcctggatgatgttctgtctccatctgttcccccaccccaagccctgacaacaggtcatctcttggccccgaaaatctgtcacctgcaccctggagcctgggtgactttgaacagctggtgaccagtctgacccttcacgatcctaacatctttggtccccagtaaaggcgctgaagcactgcatgatgttgctgagaacttggggactcggttctgtgagggggaaaagaggttgaaaagagggtttcctcttatttcttccctgtgcgtaaacataagacaatccctcttcagaataaacttgctttataatcaatataatctctgtgcctttgaatctaacaggacacctgggtcccagacgcctgggaattgggtctctcgattccctttggttttggagggaggagtttaaaactgtgcatgggagcaggagggactcaagggtggcagtggtgagtgggaggaaatacactttgggatgactcgttcagccctgagagaggggtgtgagttacccagggaatgggtagggaaggtttaaagcaacacccaaggaaagaagggaaactcatctcttgtagtgattcaaccctgagaacagatggggagtggggttggctgtcccccatggatggatgaaaggtcacctaatcagtagtcaccaggacatagtggtggaggcacaagtggccaaggagtgctcatttggtggagactgggaaagcggctgttatttagtgtctgtgtagtagagggagcgcagctggtcccagaagaagagggagaggatggtgtgggggccgaggcggaagtaggaggcacctatacccttgtacatgccaaaaatgccctcggtccgagctgtctgcagcagagcgtccagtatcccccggtacatgaggccctgagagtgtgtcagagagggagggagagcacagagaaggagtttgtcagagcccaccaggggcagcacctctacaggctgcatttcaggctatcccacctgcacccgcaatctgccttccccatcccctgcttcccgcctgcatcccagagcacttccttaccttgccctgtgcatctgtgggctggttgtagagccttgtgcaggccacatcaaagggtgccatggccaagacaactgcaatgccactcatcatggcagccaccagcgccaacttccagctctggggaggaaagatctaagggggtagagaggaagagcgttgtcaaccagccaactattacaccccaaggacaggacagtccctgccctggggacacagatgctggtaactgggggagcttccactgcaccagttataacagtgcaaaaacagtgagaaggaggaaggccagggtaccctgaaggctcaggtaccccttctgggaggaagtgacaagagaactgtgggaagggtctaaagagttgacctccaagccctcctgccactccctcacctgtgaatgttgggcaccatcccctccagggcctagtgcagcttgccctccccttccccccttcccgaaacagacccacccatttcccaggcagtacctcccactggctcaggaggtccttggtggatgagaaggtgcacagctgggtggaggaaccgacgataactcggggcaggccgcccagagccccacgccataaccccaccagaccatgtttctggccaatctcggttagcgcctgaaacatgccctagtgtggggaagaccgggggtggggttcagacagcccagcatcaggggctgccatcctaacactgccaaggatgggtccttaataggaatctcttgtccagacaaccagttcaatgtgggcttagagccagaatgtgggcccttggttgtctagccaccccattgttccttccctgggcacccaagaactggggcgggatgtatgcaagtgaggccattcactggtcaggagaaacaggggcagaaaattagaggaactggagtacatattggaaagaggcatcaggcacggtggctcacgcctgtaatcctagcactttgggaggcccaggcgggtggatcacctgaggtcaggagtttgagaccagcttggccaacatggtgaaaccccatctctattaaaaatacaaaaattgccgggtgcagtggctcatgcctgtaatcccagcactttgggaggccgaggcgggcggatcacaagttcaggagttcgagaccagcctgaccaacatggtgaaaccccatctctactaaaattacaaaaattagctggacgtggtggcgcatggctgtaatcccagctactcaagaggttgcagcaggagaatcacttgaacccgggaggtggaggttgcagtgagccaagactgcgccactgcactccagcctgggcaacagagcaagactctgtctcaacaaaacaaaacaaaacaaaaaaaatttagctgggtgtggtggtgcacgcctgtagtcccaagctactcgggaggctgaggcaggagaatcacttgaacccgggaagcggaggttgcagtgagccgagatcgtgccaatgcacttcagcctgggcaacagagcgagactccatctaaaaaaagagtaaagagggtctgggtagactccaggggcaaaatgggacagaaccgatgggttgagcagagcagtggctgggattggatctgttgggtgcaggcagaaagctaggggaaaagagaaaggatggtcagggactttggcagacttgggaaccctcacctgatgcttatactggtgccctacagcaatttctgaggctgcctgtgcctgcaggtgtgtcttcacctgggaacaagagaatatcatagcctgtgccccagtggccatcctcctacctgagaaccaaatgtctcaccccctcacacttcctctagggtgttcagcaatgaatagcctcttactctgattattgttcttcctacttaacaaactggttaacaaaaagactctgtctctaggctccagccccaggggggtggatctcccagcactgcaagacaccccaaccccttcatatcctctttcccttggggctagcagtcgggggtggagtggttggagaatggcaatatttcctaaggctgttcatgttaggcaagacctggtgtcccgcctctcatgctagctcccattcccagactggatctccagccaccacttctatcaggctccccatcagactctgggcaaaacttgctctctagcccccaacccccacagaggtatcgagctgactttggggagaccactgtccctgaaactcacaccttgaaatgagaccagactgcctctgctacaggacatactacttccccgtctcttttgctcttgggagcactaagcagggcctagtcctagcaataaacagctgtgtgaccttgagtgggtcacttcccctttctgggcctcaggctcttgacccttcacctataccagataactcaaaggggcagatgttgagattgttaattctgtgatgcccagggccttcctgatccctagactctctgacgtatgttaaattccttatcctccccttcacaaatccaacctcaatatcaacacataataataaaaacaaatgctaccaaatgcttactgtctgccaggattcgcactaatgctttcatgtctaccgcatttgtctccctcgatcctcccaataatcacacagaaagggcactataattatcaccattttacagatgtggcaactgaagctcaacaactagtaattttctttcttttctttttttttttttttttgagacggagtctctctctctggcccaggctggagtgcagtggccggatctcagctcactgcaagctccgcctcctgggtttaggccattctcctgcctcagcctccggagtagctgggactacaggcgcccaccaccacgcccggctaattttttgtatttttagtagagacggggtttcaccgtgttagccaggatggtctccatctcctgacctcgtgatccgcccgcctcggcctcccaaagtgctgggattactggcgtgagccaccgcgcccggccaacaactagtaattttcaaagccaggattttagttccagaaagtctgattccaaagcccataatcttttttttttttttttgtgagacgtagccttgctctgtggcccaggctggagtgcagtgaccggatctcggctcactgcaagctccgcctcccgggttcatgccattctcctgcctcagcctcccgagtagctgggactacaggcgcccaccaccgcacccggctaattttttgtatttttagtagagacggggtttcactgtgttagccaggatggtctccatctcctgacctcgtgatccgcccgccttggcctcccaaagtgctgggattacaggtgtgaaccactgcacccggccccaaagcccataatcttaatcaatacattcaatcgtgtccatcagatgggtgtgtatagggcagatcagaagactccgaagcctaccagcactttcctgatgcctttccctgcttgcagtggggcagcactctgccacctatgcccttgggaaagaacagctcctatcctacaacgaggatctgccctgaaggtcccaggcaagagccctcttcttaccatgtagatggggctccccaagtaggctcccatgaccccagccatggccccagctgctgcgctgcgggcaggactgtgggtgccttcggctgtgtgcaggtagcccccagcctcagccagcccataggtgcccagtcggatgccattcatcaggaactggtacaagagggcgggggccaggcctttctgcagggcagcaaggccatccaccttgccgatggtgatgaaggcatggaagacatttcggtagtgccgctggtatgtgccaggggcctgcagttctccttgcaactgcatcctggtcttcaccacctccaggggattggtgaatacacaggccccgcaggctgccaggccactcatcaagaagtccatggtgggatagctgtagcaggaactgacccaagagtaagaaagtaaaaatgggtgtcagaaagcggggttggaagacagggggaaggcctgtttcagcagtacaggttgcagaagataagaatttagatttgcagtcaagggtgtcagggtcaaatgtcaagtggtcaaacgtcagctggaatttgggagtcaagagctggcaagcagggaagagatagaaatctaggagattctggtgagaagcttaaggcaggaccctctgaggtcaaggaggggcaaaagacagaaggttgcaggtgggatggctcaggatggcgggcgacgggagcacgggagtagaggagggaatcgcggggttgggagatggaagccagggaggcaggaagaagaaagccagcaagtgagagaagaaaaggatccgggagaagagccggtgatttcctcgagccagcaacgagatctcgatccgagaaagaagtcaggactctggccaggaatgagcgtccctgagcgtccccaggcagccaccggagctcgcagtagcttcaaccccgggtagcctgcggaggccgggccgccacactcctgccactggagcgcggggccaatggggagccttcaagagccacaaccgaggccctcagccaatcagcgccgagccggctccgcggccaaagggaggagctctcggcgctcctgtccccggaatcacccggaggcggttggaattaactgtccaggctccgccaccagcgctcggccgccgactccggctccggaagggaggcccgggacgcggcggttttgttattggcagggaagagacctgggttcccgatcgaacacagaggccgagcgcagcagtcccccactggggtgctgggaccgcccctcgggtgggcggacggctttagcttcctaccccgggttgtgaccgggtggggtcacataagttcaggtccacgccctgctcggtgccggcgccaggagagccaggaagacgcggcccggcttgcggggggtagagggacacacttgcgctgcgggaccagtctcctgaggctgcacgggttggtgcttggttaattaaatccttagtccttaggctctttatttttattttttattttttttgagacggagtctcgctctgtcgcccaggctggagtgcagtggcgcgatcttagctcactgagagctccgcctcccgggttcacgccattctcctgcctcagcctcccaagtagctgggactacaggtgcccgccaccacgcccggcttattttttgtatttttaatagagaccaccgtgttagccaggatggtctcgatctcctgacctcgtgatccacccgcctcagcctcccaaagtgctgggattacaggcgtgagccaccatccctggcctggagttctttcatatgagatatttgtctctactcctccattatttattcaaccatttatttaatcagtatggactcatggacatttatactttgggttataatccaatatacttcatatttattttctagctaatttcgttctagctttggcctttgagagctgtttccgttggctcctgtgtctctttagcatacccccatccatttttttttgcacacaaaagtttttagtttataaatcttgtgaaaaatccacagtggccacagatgttactgtagcatctttactcctttggctttttgccacaccaacactgtcctttgcagtccccctttcttcattctggtcttgtgttcctttcattgctttcttgagttcttttcttctcatccaggccatgtcttggaagtcagcatttgggtttatttttctttgcataatccagtgaatcataaatcatgccaaagccagttgtcttgccaccaccaaaatgagttctgaatccaaatacaaagatgaggccaggcgtggtggctcacgcctgtaatcccagcactttgggaggcagaggcaggcagatcacatgaggtcaggagtttgagaccagcctggccaacattgtgaaaccctgtctctgctaaaactacaaaaattagccgggtgtggtggcaggcacctgtaatcccagctactcgggaggctgaggcaggagaatcacttgaacccaggaggcagaggttgcagtgagccgagattgcgccactacactccagcctgggtgacagacggagactccatctcataaagacaaacaaaaacaaacaaagatgatgacatctagtgtagtctcatacattttggctagtttttcctgaatttctgtcttaggtactgttgtcttcccagggtgaaggacctcaataaccatttgttcctcctgaagtatgtagtcagttgatcatgaacttcctagttcagatagttactaagtcattcatgatggcggtcaatcctcaaccagggagaaaaataagagtcccatcagtgttgttgtcatcattggtattttaattaaaaccttgtttttatttagtgtcaccttactttctggtactataaaatgctccaggctcattttgtgtatttcctgccacagtcctgcaatcagccatttctccaaggacccctattttcttttattggcaaatggttttagaatccaagatctgggccctaggtgtgcttgttgcttttgaggtatcattgcttctggaccctcacatctgagaaagcaaggaaatatatgtgtgtatactaacccacgtatatacacaaacatgtatttccatatataaccatccatatctatattaagctaagcatgaattcatactgatgtctccaactttaatccattactacatggatcattctagccacctcccttgtttatctaaactcccaccccaactgtgagaaacctggcttccataatttgccatctatttacttaattgtttattccaggacacgtgtataggagtatcagaattgttttgtttttctttttaaattctttattattattattattattattatttgagacggagttttgttcttgttgcccatgctagagtgcaatgttgcaatctcagttcactgcaaccttcacctctcaggttcaagcgattctcctgcctcagcctcctgagtagctggaattacaagcacgaaccaccacacctggctaatttgtttttgtatttttagtagaaacagggtttcaccatgttagccaggctggtctcgaactcctgacctcaggtgatcctcccgccttggcctcccaaagtgctggtattacaggcatgagccactgcacccggcctaaactttttcttctttctttctttttttttttgagatggagttttgctgttgtcgcccaggctggagcacaatggcatgatcttggcatactgcaacctctgcctcccgggttcaagcgattctcctgcttcagcctcccaagtagctgagattacaggcatgcgccaccacgcctggctaattttgtatttttagtagaaacagggtttctccatgttggtcaggctggtttgcgaactcccgacctcaggtgatccacctgcctcggcctcccaaagtgctaggattacaggggtgagccaccacacccagcctaaaatttttctttatatgtgccaggcacagtagctcatgcctgtaatcccagcagttcgggaggctgaggcaggtggatcacctgaggtcaggagttcaagacgatcctgggcagcatggcaaaaccccgtctctactaaaaatacagaaattagctgggcgtggtggcacgcacctgtagtcccagctacttgggaggctgaggcacgagaattacttgaacctgggaggcggaggttgctgtgagccaagatcgcgtcgttgcactccagcctaggttacagagcaagattccgtttcaataaaataaaataaaatatttctttatttgtaatcataatgtctcaaaagagaattgttaacacatacccctgtggagaacaatcttataaactagggtacagtgcttatgtgtagttccatttgcctttgatcttacagactcgactcatttccaaaattactcaggtcagcacctttcccccagctcccttcagaaaagttatttcatacattagtagtatcattaaattcttttgccacaatctgccttccatattgggttccctgacctcctaattttttttttaattaaaaatatcaggagtcaaaaaaaataaaataaaaaaaatatcaggagtctgggcgtggtggctcacacctgtaatcccagcactttgggaggccaaggcaggcagatcacctgaggttgggggtgtgaaaccagcctgaccaacatggggaaacttcttctctactaaaaaaaatacaaaattagctgggggtggtggcgcatgcctgtaatcccagctactcgggaggctgaggcaggagaatcacttgaaccccggaagtggaggttgcagtgagcaggagattgcgccattgcactccagcctgggcaacaagagttaaactctgtctcaaaattacatctatctatctatctatctatctatctatctatctatctatctatctatatatatatatatcagggctgggcatggtggctcaggcctgtaatcccagcactttgggaggctgaggtcagcggatcatgaggtcgagagatcgagaccatcctgcccaacatggtgaaccctcatctctactaaaaaaaaaaaatacaaaaattggccgggtgtggtggctcatgcctgtaatctcagcactttgggaggccgaggagggcggatcaccaggtcatgaggtcgagaccatcctggctaacacaatgaaaccccatctctactaaaaatacaaaaaattagccaggcgtggtggcaggtgcctgtagtcccagctactagggaggctgaggcaggaaaatggcatgaacccaggaggcggagcttgcagtgagccgagatcgcgtcactgcactccagcctgggcgacagagtgagactctgtctcaaaaaaaaaaaaaaaaattgaggccggatgcagtggctcatgcttgtaatcccagcactttgggaggccgaggtgggtggatcacctaaggccaggagttcgagaccagcctggtcaacctggtgaaaccccatttctactaaaaatacaaaaattagctgggtgtggtggcgggcacctgtaatcccagctactcgggaggctgaagcaggagaatcacttcaacccaggaggcggagtttgcagcgagccgagatcgcaccactgcactccagctgggcaacagagctagactccgtctcaaaaaacaacaacaacaacaacaacaaaacaaacaaacaaaaaaaacccaaaaatgtataattaggcccaaggtcacctagattttcttttatgttttcttctagaagctttatagttttactttttacatttaggtctatgatccattttgagttaatttttgtaaattatgtgaggtctgggtttggtttcttctcatcctcctctctcttttcttctttcttctttcctcctcctcctccttcgtcgtcttcttcctcttcctcctcttcttctccttcttcttctttttctccttcttctttcttcttcttcctttggtcctttgtaaaaaatctgttttctatatttgtgtggctcgatttctgtgccctcacttctgttcccttgatctgtgtgtctagcctttgaccaatatcatgctgtcttgatttattgtaggctgttaccattttttcctggatgtgaatgtcatgaatcagatttgagaggagttgcatagggaacgtaaaagtccccaggtgtctgaaagaaggggtggtaacatagagagggagcgagaaagacggggaggcttggagggcagggggctgtgtctttcttgcctcttccttggtagcctagacactgatgggttccttttggctgctgagcgcgcacccgaagtgctcaaactccacctagtggtggtgaggaaggatcgtctctgtgtatcctcacctgggccaaaacctgtataaattcccagagcaggccagcttttccttactgcttcttcctgatttatcccccatcacaggcaggctacctacattaacagctttgcagacagaaatgaggcccaggtgttctgtgctccatgaaagagtctactggacttccaagtcctggccctaccggagggagctggactcaacacttcttttattagaagctccctttataagggattgttttgttgtaagtgacagaaatccaactcaaactagcttacaaaaagggaactcattgactcacacaactgaaagctccagacacacacatgacttcaggccagcagaatcaggcactcaaatctgtctctctccacctctgccatgtatcggttttattctcaggccacctcactgatggccactagcagctgcaggcccatattccaccagcttagcatcctcagtggaaatgtaactgcccagtgggctcttcctgtcctctgcacaaataaagaccacggcattgcagtaaagaaagagtttaattgacacgaggccggccatgccacatgcaaaattgattattactcaagtcaatctccctgaaaattcagagatcagggtttttgataatttggtgggtagggggtcagaaagtggggagtgctaattggttaggtgggagacgaaatcacagggagttgaaactctcctctttcactgggtcggttcctgggtgggggccacaagaacagatgaaccagtttattgatccgggtgttgccagatgatgctttgagtgcagggtctgcaaaatatcacaagcactcatcttaggttttacaagaatgatgttatccccaggagcaatttggggaggttcagaatcttgcagcctccagctgcatgactcctaaaccaaatcttatttatttattttttttttgagacggagtatcgctttgtcacccaggctggagtgtaatggcatggtctctgatcactgcaacctctgtctcctgggttcaagcgattctcctgtctcagcctcccgagtagctgggactacaggcgtgcgccaccacacccggctaatattttgtatttttagtagagacagggtttcaccatgttggccaggctggccttgaactcctgacctcgtgatctgccaacctcggcctcccaaagtgctgggattacaggcataagccactgtgcccagccgaaacgggagttttattacattattactcaaatcagtctccccaagcagaatcagttttttgtttgtttgtttgtttgtttgtttgtttttgagacggagtctcgctctgtcgcccaggctggagtgcaatggcgccatcttggctcactgcaagctccgcctcccgggttcacgccattctcctgcctcagcctccccagtagctgggcctacaggcccccgccaccacgcccggctaattttttgtacttttagtagagacggggtttcaccgtgttagccaggatggtctcgatctcctgacgtcgtgatctgcccgcctcagcctcccaaagtgctgggattagaggcttgagccaccgcacccggctaccagaatcagagtttttaaagatcatttggcgggtagggacttgggaagtggggagtgctgattggtcaggttggagatggaattgcagggggtcgaagtgaggttttcttgctgtcttctgttcctgggtgtgatgacagaacaggtggtgccagattaaggtctgggtggtatcagctgattcatagagccagcggctgcatgacccccaaactaatttataatcttgtagctaatctgtcaatttgttagtcctgcaaaggcagactggtccccaggcaagaagggggtcttttcagttaaggactattaacaattttgtttcagagtcaaaccatgaactgaattccttcccaaagttagttcagcctacgctgaggaatgaacaaggacagcttaaagattagaagcaacatggaactggtgaggtctgatttctttcactgtcataatttcctcagttataactttacaaaggcgattttaagaccctgtctcaaaaacaaacaaacaaacaaacaaaaactatcgtgatccactccccctactctgctctgaaaccttcagggcctgtctgcccggtgtgattgctcacgatatggcctccatgtgtccctcttttcatttcagatcagtttgtttccctttcacggttctccagacgtgcctactttcctcttcgctgtgcctgcgcttccctggattcccacaatgctccttcatgccctgcctcttggcttggctaaacccctctgcctgattttaaatgaacagtcaaagtgcctcttctccctgacacccactttttccaaccaacaggtcaatgacatgaggaagaccgaaggaggctgctgggtgtggacacaaagagatggagcagacgcttatgggctccttcatccttccagaacagactctccaagcaaagtctaaaccagtcacattgaagctcctagggttacttcattaataatatttcaggccgggcgtggtggctcacgcctgtaatcccagcactttgggagcctgaggcgggaggatcacaagattaggagttcaagaccagcctggccaatatggtgaaatcccgtctctacaaaaagttagccaggcgtggtggcgggcgcctgtagtcccagctactcgggaggctgaggcaggagaatggcttgagcccaggaggcggaggttgcagtgagccgagattgcaccactacactccagcctgggcaacagagcaagactctgtctcaaataataataataataataatacttcaaaaagacttcaaattgaagtcttttttttttttttttttttgagacggattctcgctccgtcgcccaggctggagtacaatcgtgtgatcttggctcactgcaacctccgcctcctgggttcaagccattctctggcctcagcctcctgagtagctggtattacaggcttgtgccaacatgcctggctaatttttgtatttttagtagagacggggtttcatcttgttgtccaggctggtcatgaactcctgaccttaagtgatctgcctgcctcagcctcccaaagtgctgggattacaggtgtgagccaccacgcccggctgcactaattatttgtaatggtaaagagtgtaagcttccctaggaggactgtctcccagttctgcactaggggataaattgtaatggtcaaggttctttcagcagtaagtgacagaaaaccagctaaaaccagctcaagcgcaaaagggaatgtcatgcctctggaagctgggaggtccaagggactcaaatatcattgtaatccccagcttttttttttgctctgtcacccaggctggagtgcaggggcgtggtcttggttcactgcagcctcgaactcctgggctcaagtgatcctcctgcctcagcctctggagtagttgagactacaggcatgcgccaccgccaggcttcctccctctcttggctctgcttccctcaggtatggggctcattttctcccactgttgactggcttcctccttttccaggggaaggaagtaggccaaggtatagacagctcctgacttagattgttcctgccttgtgagcttggaggaaagagaaagcttctctttctcagaggcccagaagcttctctttctcctggagtctgtcctgacctgctcattcctggaccagtctctgtggccagaggaatacggcactgtgattgaacaaacctgagtcacgtggccagagggaggctgttgtgattggctgtcccactggaaccacatggagtcgggtgggtgatggagagtttcgtaggagatggacactgctgttaccaggaagatgaaatctatttgatgcaacattatattccaggaaacgttatagctgcaaagaccacgtagcgacatgaaaattggttataaagcaatgctaagagaacaaggcagaagacagacttgaaactatgatggcacatttggaatatgaaaaaatagaaaacttttgctctgtaagggtggtagaagaatgaattattacgtcaaaaaccttcagtgtctttgcaaaagtattttataataaataacgtgtgcatgcacaaatagtctcatgtttactgcataatatgattttcggagctcagtttctttttgtaatgagataagacacaaataaaatagatggtgatattgacaaaaagagtcaaactctgtaaaatatttgaagagatttattctgagccaaatatgagtgaccatggcctgtgactcagccctcaggagatcctgagaacatgtgcccaatgtagttggggtgcagcttgcttttatacattttagggagacatgagacttctatcaaatacttttttttttttgagaccaagtctcactctgtcacccaggctggagtgcagtggcacaatctcggctcactgcaacgtctgcctcccaggttcaaacgattctcctgcctcagcctcccaagtacaatagctgggattacaggcgctcgccaccacgcctggcttatttttgtatttttagtagagatggggtttcaccatgttggccaggctggtctcgaactcctggcctcagctgatcggcccgcctcggcctcccaaagagttgggattacaagcttgagccaccgcgcctggcctcaatcaaatacattcaaatacatttaagaaatacaggccaggcgcggtggctcacgcctgtaatcccagcactttgggaggctgaggtgggcggatcatctgaggtcagaagttcgagaccagcctggccaacatggtgaaactccatctctactaaaaataatagcaaaaattagccggacacagtggcacacgccggtaatcccagctactcgggaggctaaggcaggagaattgcttgaacccgggaggtggaggttgtagtgaatcaagatcatgccactgcactccagcctgggcaacagaaagagtatcaaaaaataaaaaaataaaaggctgggcacggtggctcatgtctgtaatcccagtactttgggaggccgaggcaggcagatcacttgaggtcaggagttcaagaccaacctggccaacgtggtgaaactctatctctactaaaagtacaaaaattagccggacgtggtggcgcatgcctgtaatcctagctgcttagaaggttgaggtaagacaattgcttgaacccaagaggcagaggttgcagtgagccgaaatcctgccactgcattccagcctgggcaacacagacttcgtctcagaaaaaaaaaaaagaaaaaaaaaagaggagtagtgaactgtgggaaggattcaattcaatttggttcaattcatcaactattgagcacctattatgtgcctgatcctcttccagaactttgggatatacagtgtgaaaggaaaatgaatcttggggcccccaaatcactaagctaaagaaaaagtcaagctgggaactgcttagggcaaactgcctcccattctactcaaagtcatccctctgctcactgagataaatgcatatctggagccggggcgcagtggctcacgcctgtaatcccatcactttgggaggccgaggcgggcagatcacgaggtcaggagatcgaaaccatcctggtcaacatggtgaaaccccgtctctactaaaaatacaaaaattagctgggcgtggtcgtgggcacctatagtcccagctactcgggaggctgaggcaggagaatcacttgaacccgggaggcggaggttgcagtgagccaagatcacaccactgcactccagcctgggtgacagagtgagactttgtcaaaaaaaaaaaaaaagcatatctgattgcctcctttggaaaggctaatcagaaactgaaaagaatgcaacagtttgtctctcacctacctgtgacctggaagccctctccgtgcttgagttgtcccgcctttccagactaaaccaatgtacgtcttacttatatcgattgaggtcttatgtctccctaaaatgtataaaaccaaccaagctgtgccctaaccaccttggacacatgtcatcaagatctcctgaagctgtgtcacaggtgtgtgctctcaaccttggcaaaataaattttttttttttttgagatggagtctcactctgtcgtgcccaggctggtgtgcagtggtgtgatcctggctcactgcaacctctgcctcccgggttcaagtgattcttctgcctcagcctcctgagtagcagggattataggcatgcaccaccatgcgcggctaatattttgtatttttagtagaatcagattttcaccctgttggccaggctggtctcgaactcctgacctcggtgatctgcccaccttgcctggctaaactgcctacttttgtattgtgttacctgatttattgactaaaatagttattgcaacagaggctactcttgctttttttctttttccttttcatttttttttttgagatggaatctctgtcacctaggctggagtgcagtggcccgatctcggcccactgcaacctccgcctcccgggttcaagcaattctcctgcctcagcctccaaagtagctgggattacaggcgcctgccaccacgcccagctaatttttgtatttttagcagagatggggtttcaccatattggccaggctggttttgaacccctgacttcaggtgatccacccacctcggcctccaaaagtgttgggattacaggtgtgagccaccatgccaggccaaaaacaattttttaaaattaagtttattacatccatgtatttttctgtatgtgcttttaaagtccttgtgacactgagttacagggctttgattcttgggtctaaaaaggacaccaattctgctaaatcttaaaaactaacatcaattaaagcctcatcttcaggcccagtagaagatgccaatcaaaataactgtattgccgagacacacggccacaaattaaagctgttaaactcctcaaggcccagggactattgcagaagaggtgggcatgtgagatggtaagggttgattttgagaaataaaataaattcagtttctctataaattaaccattaatgtcaaagacacactgatgcaagaccagcatatgggcccctgtgtcagattcacaaggttttcttggagcattaactgactccttaataaaggttataaaggttatacaaaggttatggaagttacatcttatggtcaagattaaaatgttatagactatttataaaatttttggggccaggtgtggtggctcacgcctgtaatcccagcactttgggaggccgagtcgggcatatcacgaggtcaggagttcgagaccagcctggccaacatggggaaaccctgcctctactaaaaaatacaaaaaattagccgggcatggtggcagatgcctgtaatcccagctattcgggagactgaggtagaagaatcacttgaacctaggaggcggaggttgcagtgagcagagatcgcaccactgcactccagcctaggcaacagagcaagactccgtctcaaaaaaaaaatttttttttggaaaaaatttaattggcttcatgctgtttttattggggcttattgtttggaaaattaagtctcttctgggattacaggggagtgccaccatgcctggctaattttttttttttttttgagatggagtttcactcttgttgcccaggctggagtgcaatggcacgatctcagctcactgcaacctccgcctcctgggctcaagtgattcttgtgcctcagactcctgagtagctgggattacaggcgagtgccaccatgcccggctaattttttttttttttttgagatggagtttcactcttgttgcccaggctggagtgcaatggcacgatctcagctcactgcaactgccacctcctgggttcaagtgattctctctcctcagcctccagagcagctgggattacaggtgcccgccaccatgcccagctaatttttgtattttttttttttagtagagatggggtttcaccatgttggccaggctggtctcaaacttctggcctcagatgatccaccctccttggcctcccaatctgctaggattataggcgtgagccacggctcctgggacattttttatttttattttttttgagatggagtcttgctctgttgcctaggctggagtgcagtggcaggatcttggctcattgcaacctccacctcctgggttcaagtgattctcctgcttcaccctcccgagtaggtggtagtacaggcgtgcgccaccacacccggctaatttttttgtatttttagtagagacagggtttcaccatgttggccaggctggtctcaaactcctgacctcaggtgatcctcctgcctcggcctcccaaagtgctgggattacaggcatgagccactgcgcccgacctctgcacattttttattgttttcagacagcatattgctctgttgcccaggctggagggcagtggtgcgatcacggctcactgtagtgtccaactcctgggctcaagtaatcttcccacctcagcctcctgagtagctgggaccacagatgtgtgccattatggcttttttttttcttttgagatggaatttcgctcttgttggccaagctgaagtgcaatggcgcgatctcggctcactgcaacctctgcctcctgggttcaagcaattctcctgcctcagcctcccgactagctgggattacaggcgtgtgccaccatgcttggctaattttttgtatttttaatagaaacggggtttcactatgttagtcaggctggtctcgaactcctgacctcaggtgatccgcctgcctcggcccccctaagtgctgggattacagatgtgagccacctcgcccggcctgtccacggctaattttttaaaaatcttttgtagagacagggtcacactatgttgccgaggctggtcctcccaccttgccctcccaaagtgctggagtgctgggattataaggatgagcaaccacgcctgggcccctgcaaatgttatacctccctggaggagacagaccccaagtccacacttctctcttcagtcctacctcctggccctccccttttctctctcctctaacacacacacacacacacacacacacacacacacacacacacacgccagacacaatggctgggtggggctgaggaactggcttcctccgcagagatctcaatctgggccctgagttcccaccccagaatcacaggaacacacacttggaaacctcagccctgcattcctcgctccaaggggcagacaggacaggctgaaaatagcaactggttccaaaaagataaaggtaaattcatggggacctactgcagagttagggagggaagcctgcgggagggtccctgggtgtgaaataggcgttggctcacacccggctcaggagacaggtggtggtgcaagtcggggaaagatggtgagactcgccgtggagggacgcacgcagcatcccttagctgagacagaggcatccagacacccatgctgctcagccaggctctgtgccattgccgtcttgtcctcatccctacccctgtccacctcacccctatgagccccgatccacacagctgtgcaggtagaacctgcgcacacactttccaagcctgaatttcagcttttccccagacccctttaacctctgagaccctggatacctctgtctcctggggccctgtgtgatgtgcgcatgtggagagtggtgtggttcgtgaggggggggtgtccggttgggaggcggatctgattcctgtttcctgcccctactcactcagccctgggaggtgactgagagtggaggggattcaagggtgagtgcttggggcccgagtacctgggttcctaagggtggggtagggaaggaagtaaatgcaggtacccgagagggggtgggatccctgaggggcaggggctggggaggagttggccagtggtcaagactaccgtgtgggtcactttgctaaatgactttctgccagaacacagaggccactgagctgcaagacccatcatctacaacccccttgttcccccctcatcatttctcaaggagccagtccgaggcctggaggggtctgactctcctgctgacccctgaagggagtttgggggttcctctgcttcccagccctgaccctgcagccttcttgggattgtagcctccttcctcgagggaggaagagaaacccaggccgcagcgccctggcccgactggtcctgtccttcggttcattctcccagccacctccccaggcctcttggcaagacccatggctgtgctgggcctctctctgtgaccagaccctagggcaggcggggatgatcagacgcaggacaggagagacctcgccaggacctcctcatctccgggggtcagaggctccaagaatcttgatggcaggaaaaggagactaaaaataatccggaaagggagagtccggagagaggaactgggaaatggggggcggagggccagtggagcagggaaacagtgatgcacgcctcgcagcccaggcccggcggacaggcgcgcccacggcacccagacccagacagcgcagaacacacatggcacacccaccctggcaccgctatctcagacactcacaccgagaacttcctaaagggccacacaccacacaccgtatgctccactctccccctgcacacccacccggcaagcacagaactcgcacactcacaacacaccatgccaccccctacacaaaccacacacaaacctccacaacacactccacggacacacggttcagtgggcagacacggagcggctgtatcccgtattgagttttatggattctctggaacccccacaccagccttccctcctgacttcaaaatcctgccttccagtggccccagtttaccctccctgtggggcactaagggtctttctctttccctccctcctcctcaggggatgactccagcagagcacctcactcctttgaagagcacagaggaagatgtcagcccagtcccttcctgcagcaacaccccccacgcagaagccccctcggatcatccgcccccgccctccttctcgttccagggctgcccagtccccagggcctccccacaatggctcctctccacaagaactaccccgaaactccaatgatgcaccaaccccaatgtgcacccccatcttctgggagcccccagctgcatccctcaagccccctgctcttttgcccccctcagcttctagagccagcctcgactcccagacttccccagactcaccttccagcacccccacacctagtccagtgtcccggcgctccgcctccccagaacctgctccccggtctccagtccccccacccaagccgtctgggtcaccctgcacgcctctgctccccatggctggagtcctggctcagaatggctctgcctcagctcctggcactgtgcggaggctggctggcaggtttgaagggggtgctgaaggccgggctcaggatgcagatgccccggagccaggtctccaagcgagagcagatgtgaatggggagagagaagctcccctcaccgggagtgggtcccaggagaacggtgctccaggtgagtgtggcgggtggggggcgctgggtgacctcaatccacccatcttctccgttttcagtgctaacaactttcaggggctaccttttcaaaaatggagttaatgtttgggatatctggtttctgtatgtcgggatttgaagggagtcagggtggaggagatctatagatgcctggaccttgatattgcagttgctgggcaggttaaagatggagatggtctgggcgggggtggagctgggccccaagggctttctccttaggctacctgtctcccacagatgctggcctggcctgccctccctgctgcccctgtgtctgccacaccacccggcctggcctggagctcagatgggtgcctgtggggggctatgaggaggtccccagggtcccccgtcgggcctccccgctgcggacctctcgctcccgcccccaccctccaagcatcggtcaccctgccgttgtcctcacatcctaccgctccactgctgagcgcaaactcctgccactcctcaagcctcccaaaccaactcgtgtcaggcaggatgccaccattttcggggaccccccacagccagatcttgatctgctttctgaagatggaatccaaacaggtgcagggcctgggggagtggacctctgggctgtgaggggacaggagagaggcaggggggaactaaagcccagcaaactacaatccccaacaggcactgggctctttgcttccccaccagctgctgctctggtgctgaagagagttgcagtttttatagtaaccatccctgctggggctggagtcgggagtcctggctggggatcctggagtttttttttctcttcactctggcttctctctccaggggacagtcctgatgaagctcctcagaatactcctccagcaactgtggaggggaggtactgaacacccccacccctactccctggttctctccccaccatgcttctacctgagggcagactaaccttcagctccagctaaatcccacctccacaaaggtgaggggacaagggccagggctctagagataagcagcccttgtttcgaatcccagctctggcccttatcaattctgtgatcttatagaaggccgggcacggtggcttacatctgtaatcccagcactctgggaggccgcggcagaaggatcacctgaagtcaggagttcaagatcagcctggctaacgtggtgaaaccctgtctctactaaaaatacaaaaattagccgggcatggtgacgggtgcctgtaatcccagctactcgggaggctgaggcaggagaatggcttggacccagggagatggaggttgcagggagccaagagcgtgccactgcactccagcctggtcgacaagagagaaactccatctcaaaaaaaaaaaaaatctgtagccttcctgggtctcagtgtcctcatctgtgaaatggggctaagcataggaaccacctcatggaatcgtggggatatgatattgtgaagagccgggtccagagtaagtgagtgcaccattttaactcccttccctcaccttgagcttctattgcaattattgtccgaaaatctatttggcaatcatgaccatctcttctatgctatccaggattgttaattatcttagattcaccattgttatcagaagttatctgtgtccattcatttattcaacaaacatttactagtgtggtttttagcttgggcgaatgggggtgtggtggtgctgatgaccacagcaggggagataaggggctgcaggtgctggtgggaggtgtgagagtttgcagtccatcacgttgagcttccttgacacacaaatagggcgttccagacaatggttgctacgtgagacggctgacaaggagactcagaaatctctggtctgcaatagttgacataagaatggggcccacttagttcaggggctcctctctaaaaggcacataaaaagatctggaatttgggccgggcaaagtaggttacgcctgtaatcctgacactttgtgaggccaaggtggcaggattgcttgagaccaggagtttaagaccagcctgggcaacataacgagaccttgcctttccccttcaaaaaaaaaaaaaaaaaaaaagcctgaggtttgatttggggagccgtcagggtccctacatccaacctgcacatgggttgccctgtccagcatgagaacaagcacccctacggtgggcagcagtggtggccctggggacttccttccctttctttctccacagggaagaggaggggctagaggtgctgaaggagcagaattgggagctgcccctgcaggatggtgagggcctctggacctgagggtccctgctgtgaccatcaagcagtggggaagggtttgggagccctgggcttccctgaagtgctatgtttgccctctagaacctctgtaccagacctaccgagcagccgtgctgtcagaggagctgtggggggtgggtgaggatgggagtccttctccagcaaatgctggagatgcacccaccttcccacgaccccctggacctcgcaacaccctgtggcaggagcttccggctgtgcaagccagcggtcttctggataccctcagcccccaggagaggcgcatgcaggaggtgggagctggaggtgggagatgggaggggggtgctggggttgggctgcatgggtcaggcataggggaggagggcccagggtcctagcttcccacggtgaactgggcttcccacgactgcctgcttttctttctagagtcttttcgaggtggtgacgtccgaggcttcctacctgcgctccctgcggctgctgaccgacaccttcgtgctgagccaggcactccgggacacgctcaccccccgtgatcaccacacactcttctccaatgtgcagcgagtccagggagtcagcgagcggtcagtggctttccgtccttccagggaacctgcccttaggctgctgggcacgccctttcctctctcccgggcccaggtccttccttctacggacccagttagttcccaaaccttctctcaagaacccgggagacctggctctctgccccgccccattgcttgcttccccaattccttcaggtttctagcaacgctcctgtcccgtgtgcgctcttccccccacatcagcgacttgtgtgatgtggtgcatgcccacgctgtggggcctttctcggtgtatgtggattatgtgcggaaccagcagtatcaggaggagacctacagccgcctcatgtgagtgtcccaggggtggggaggaagctggggagagggatgggaccgaggccacagcaggttggggcaccagggcctccaggcagccgctagccatgcctgcttctgcagggacaccaacgtgcgcttctccgccgagctgcgccggctgcagagcctccctaagtgtgagcggctcccgctgccgtccttcctgctactgcccttccagcgcatcacccggctgcgcatgctgctgcaggtacctgtcccagctgcggccgtttctgccccaccaaccccatcggagaactctcccgagggcttcttggccctccagctatcaccatgcactactccaccttaaacataaaatcccccaaatcataactccgaatctgggtctctcagcctaggactcaccaagtcctaccttaggggccctgtgctcttccccttacctggactgcctctaggtccaggtgcagggaaaggccctctggctggagacatgagttccacacctagctctgccactgactctctgagtgaccttaggcaagtcccttctgctcgctgggtctcagggggagtgtgtgagcggtttttgaggttgtctctggctatattcttctacccacatgccttcccagctggggtggtatcacccccaagggggcaaaaattggttctttgggggtgaaaataatcttagttattccaacagttgtactccattaagctttagtgcataaacagagttccagtagatctgtagaattaaactttcatggtgagggagatgtttagggaaaattatcttaaaaaggcaacttagtggggtgatacgggggaaaaaaaagtttgagatttgagacactttcttcctcctcctcctcctcttctccatctccttcttcgagacggagtctcactcccaggctggagtacagtggcgcaatatcggctcactgcaacctctgcctcccgggttcaagcgattctcctgcctcagcctcctgagtagctgggattacaggtgtggactaccatgcctggctaatttttgtattattagtagagatggggtttcaccatgttggccaggctgctatcgaactcctgacctcatgtagtccacctgcctcagtcacccaaagtgctggcattacaggcgtgagccactgcacccggcctaagacactctcttctatagcaaagcagagagtcctttctaaccaggtctcccaatatggggatctttagagcactggcacgatcacggctcactgcagcctcaaattcctgggctcaagggatccttgtgcctcagcctctagagtagctgggactacaatgccaccatgcccggctatttattaatttttatttttatagagacagggtctcactatgttggccaggctggtcttgaactcccggcctcaagcaatcctcctatctcagcttctcaaagctctagcattataggtgtgagctactgagcccagtgaatgaggggatctttatgtgaagagttcccaactagattatcagtgtctttatgatcttattcagctttatctatccccattgtagacaacaaaataataataatgatactaatcaaaatagctcaacagctattaagctttctaggaatggttctaagtgctatacacctgtgtaaccttacctgcaactatgtgagggtaggaactattacttgtcctactttagacatgagaaagctaaggcacaggtcacataacttgcctcaggtcatacagaaataattgatggagacaaaattgtaatctaagcactcttagctactctgctatattgcctgcactaacagttttggttaataattattaaaataataggaaccttcggggcaggcacggtggctcatgcctgtaatcccagcactttgggaggccgaggcgggtggatcatctgaggtcaggagttcaagaccagcctggccaacatggtgaaaccccgcttctactaaaaatacaaaaaaattagtcgggcgtggtggcacacgtctgtaatcccagctacttgggaggctgaggcaggagaatcacttgaacccgggaggcagaggttgcagtgagccgagatcgcacccctgcactccagcctgggtgacagagccagactccggaagaaaaaaaaataagaaccttcttttcaacatttaatatgtgccaagaactatgctaagcactttacatatattgccttcttgaatcctcaaaacaatgctattgatatgctaggtgggtattagccccattttacagatagggaagctgaggctcagagaggtaacaggacttgctcagggttctgcagatggtgagtgatgaggtctgtcagccttgttgaaactggctgaaacagacagggtcctctgagctgtggcccctctgaatcccagggccacagagcagggggcccagtcacccttcctccttgtccccagaatatcctgcgccagacagaagaggggtccagccgtcaggagaatgcccagaaggccctgggtgctgtcagcaaggtgggcagtggggaagctgaagcagggggaggtgacaaggtggtagagagaaatggtagggagcagggggctggccgctggggtggtgacacagctccccttacctagatcatcgagcgttgcagcgctgaggtggggcgcatgaagcagactgaagagctgatccggctcacccaaaggctgcgcttccacaaagtcaaggtacatcgctgcccaggctccccatcttgccctgccccatgttgctgctgccacgctagaacctcctctgcctccgcttcctcgcaggccctgcccctggtctcctggtcacggcgcctggaattccagggagagctgactgagttagggtgccggagggggggcgtgctctttgcctcgcgcccccgcttcacccctctttgcctgctgctctttagcgacctgctgctcatcactcagcctaagaggtgagtcctagggaaggaaggagcccaggctggagtgggcaggaggggtccagcgggacccctgctgtccttctgaacgacctcatccctgggcagtgggcagcggttacaggttctggactatgcccatcgctccctggtccaggcccagcaggttccggatccatctggaccccctaccttccgcctctcccttctcagcaaccaccagggccgccccacccaccgactactccaagcttcttccctgtgagttgtgtttccctcagaaaacaaccttgggacacttatctgacctctcagacctcccccacttccccagtctctctcttctgtggctcctgcctcagccccagaggatcttttgggccaactgtgacacttcccaatatccccaccagatcagacatgcagcgctggctgggagccttcccaaccccaggcccccttccctgctccccagacaccatctatgaggactgtggtgagtatccccctagaggggatgagggaagaaaaagcgagtcttagaggaatatgggggagaagctaaacagaatcactttaatgtcacccacccccaaccagactgttcccaggaactgtgttcagagtcgtctgcacctgccaagactgaaggacggagtctggagtccagggctgcccccaaacacctgcacaagacccctgaaggtgagaaagtctttcatttatttattttgtatttattattattattttttgagacagagtctcattctgtcagccaggctagagtgcagtggtgtgagctcggctcactgcaacctctgcctcctgggttcaagggattctcctgcctcaacctcccaagtagctgagattacaggtgcccaccaccacgtctggctaatttttgtatttttagtagagatggggtttcaccatgttggccaggctggtctcgaactaacctcaggtgatccgtcccctttcacctcccaaagtgctgggattacaggcatgagcctctggtgccaggccttatttctattcttttttttttttaatggaggtggggggtctcactatgttgctcaggctggtcttgaactcccgagctcaagtgatcctcctgcctcaggctcccaaagtgctgggattacaggcgtgagccactgcgcctggccgtgtttcatttattcattcaataaatatttattaagcacctacaaagtgccactcgctgttctagggactgtgaatcaaatatatcacacttccttccttgctggagctacgttctagcagaggaggcagacgataaagaatgagcaaaatagataagtaaattataaagtacatgtgaaggttatgagtgttatggaaaaaaaaaaaagtgagcagagcaaagaaggtcaggagttccagggttgggcagactgaaattttcaatagggaggccgaggtggacctcactgagaaggcaacatgaagcttgatggagctaatttaggcccatggtgtctgggggaagagtgtcccagctggaggcagcaggcagtgcaaaggccctgcggctggtgtgtgactgaggaactgtaaggaggccagtgtgactagcaggagagagaaagggggagaagcaaatgaggtcatagaagtggcagggatgggatcacgcaggacctgacaggtctctgcaaggactccacctcttactccaagagacatgagcagccactgcagggcttgacggaagagcagcccagactctctccgagctgctgtcacctccacttctgatgccctttctaccgatgctccaggcttgtccatgaattcccacacctacaatgaccctgaaggcctgagaccccacgaggccccctttgcctcctcacctgctccctgcccccacctcattggagcctctgtctctcttcccccaggttggctgaaggggcttcctggggccttccctgcccagctggtgtgtgaagtcacaggggaacacgaaaggaggaggcaccttcgccagaaccagaggcttctcgaggctgttggatcttcttcaggcacccccaatgcccccccaccctaatgcaggctgaggagggggcacatgttgggagacacctaccagtgtggcacggagagaacaaagcccattcatccattggattcactgtcagtggagatactacctctcgtggcaaccatagagatcgagcttcaggacagagcagccaatgaaaacggccgcctgaacccacagcaataagaatgaatgaggatgccttgaatgtgtggccaatggagacagaggcttagtgcagagcagccaatgggtactgagctggctgagcctatggccaatgagtattcctgctatgctcagggccaaggaagacaaatctaggtcatggcagttgaaaaagggcctcattggagataaagtcgtaggataaaattgggaacaggaatgagcaggaagccaatcagccaaagaaaatggtgatctggacccaagagaccagtagtcaccctgcttgtttctgcagcaatgactggtcctgtcttttgagtctgggaaatactagtttccattcctggatgcttcctgtgccctctcaagccagttcttctcttccagaagaattcagagtatgtgtctcagaaaatctgtgtgtgtacatgtgcatgtgtagatatgtgtgtatatgtatcaggaaaggcattctgctgactgtggtgtgtgtgtggtgattgtgctcctgacccacaaatgactgagtgctccatttcttcctttaccccccatttttcctattattcgctccaagaaagatgctaagtctgagctccagaagagactgtgctgggtgtggcttggcacccaggggatgagagccctgagctttgggtctcttggaggctagggttctgtggcagttgcagggcaatgttatggagcagccaacggcctggcagaggagcccaagggactgaagatggccagtagctgggtcctgaggcccctgaagtctgcagacccttctccttgccccaaacactggcctccataattcctgcctgcagatctcccaacttgaactataatccaccagccagcctcagccttgagctttggaaccacattagatcctgcatctgggtgaagaaacgggagctgtggaccacaggccagccagtgaacctcctgggctttcttgcctttgtcctgatcctctcacagaaacactgggccaaacagtggggagagattggagagcgggtgtggctgcccaaccccatccagagcatctgcttccagatgagccagtgcctcgcatgataccagaggaggcgagggacagagacagcaaggcagacagtggctggcaggggggcccaggcccgggacgaggcctccccttcagctcaggcacagcaacttgcccaggactgacactgtcaccctgactgcaggaggcacagggactccgggagactcagagggcgaagagcactggcatttggcatgtccatgacattggagactcccctagcagggtgcctgacgtgtggggaaccctcagtaaatagtggtgcatttgtattgaggctctctgaggaagtgtgtgcttataggagcagtggtctccaagcatggtttataaggggatggggctgcttggaaaggggtccagagcaggggtcaattctgttgggaactggggcttgaaggtcatgtgctagacctgagtgtgttagcccactcacagttcctgagggatctcaggtggtggtggttgtggcgatggtggtgggtttgcaacagctgtggttgggggctgctgcaggctgggcaatgcctggggctttggcaggggatgagaatgcagcaagaaggataaaaagggcagtcagggccgggcacggtggcttgcacctgtaatcccagcactttgggaggccgaggtgggcagatcacttgagctcaggagtttgagaccagcctgggcagcataatgaaaccctgtctctacaaaaaatacaaaattacccaggtgtagtggcatgcgcctatagtcccagttcctcgggaggctgaggcaagaggatagcttcaccctgggaggtcgaggctgcaacgtgccatgttcgcatcaccgcactccagcttgggtgacaaagcaagaccttgtctcaaaaaaaaaaaaaaaaaaaaaaaagggcagcgataaaggccctttactgaccagccaatcatctctgtgtttaattcaattatacctatttattgagtgccttctatgtgccaggcattgttctaggatctggggatacagatatgaaaaagacaaagtccttgccctcaggaagccttcatcctgagggtgagaggtgacagggacaattaccatgtcaacaaattaataagtaagataagatcaggccaggcatggtggctcacccctgtaatcccagcactttgggaggctgaggtgggcggatctcttgaggtcaggagttcaagaccggcctggccaacatggctaaaccctgtctctactaaaaatacaaaaattaggccgggtgcagtggctcatgcctgtaatctcagcactttgagaggccgaggcgggtggatcacctgaggtcaggaattcgagaccagcctggccaacatggtgaaacactgtctctactaaaaatacaaaaattagctgggcatggtggtacatgcctgtaagtcccagctactcgggaggctgaggcaggaaaatcctttgaacctgggaggcagaagttgcaggaggttgcagtgagccgagatagcgccattgcactccagcctgggcgacagggcgagattccatctcataaaaacaaaacaggggccgggtgcagtggctcatgcctgtaatcccagcgctttgggaggccaaggcgggtggatcacctgaggttgggagtttgagaccagcctgaccaatatggagaaaccccgtctctactaaaaatacaaaattagccgggcatggtggcgcatgcctgtaatcccagctactcgggaggctgaggcaggagaatcgcttgaacccgggaggcagaggttgcagtgagccgagatggcaccattgcactccagcctgggcaacaagagtgaaactccatctcaaaaaacaaaacaaaacaaaccctcccctccccaaaaaaaaacagcactaagataaaatcagtaagcagtaagcagaaaatacagcaagggctgtggcatagaatgttgtgtgtgtatgttttgggggagggtggtggctttagggcagatcctggaagagatgacatttgaactgagacccagatgacttccagaggaagtagccctgggaagatctggggaaagagcattcgaatggaggcaacagggggcgatagtccaggaacagaaggtagtggtagtggggatgggaattggtgcacgtgccccttcaagtgtcctggtaggtggagcccctccccaccaaggtctccctccctctttggcataagatggagacacactgggatactcagacagacagacatccgggggcagacgtgccccatacaccttctctcctggctcctcatcccttactggagtcctgccactaaggaagcccccatgctccaattcagatgttctgatggtgggataatggggagatgccgaccaggtaagggttattttgggacataaaggtgtataaaatacaaccatatgttccaaaagagactgagaagacaggaagggaggggactgccatgtttcctgacttttgggggttggattctgttatctcagagcctgctttccattttggggtgacctgagtgtgtttgtcctggaggggtctgcattctgctggcctgtctaagggggccgaagggcatgaaacacagctatatgggaaaggaacggatgtgggggaatgaggactacagcaaggagagcgtggatagacagaagatgggaatggggatggggtaaagaggacagaagagggaggctgatggggggtgttgcaggacaggtggcaggaggtaactcagctcattccaaattgtctccctccctctccctcaggcatctctgctatgggtgtccagtgtcccctcccttctgtgttcttcctgcccctctgggttgcctcctgcaacttcctcataggtggcgtaggagggcccatgggagaaacctctcagcggtgccctgtctgcgttccaggcatgctggtgggggtagtacagagaggttcactgagtcagctggggagtcctagagccactatcaccttattccctcacagtctatcatgctggggaggtggaagaaaccaacatttccacaggctcaggaaaggtgcaggcgtccccggggggagatgcctgaggcgacagggtgggaaagctggccccagttggggacctttctctgagtcagtgtggacactcttcacccgtggccctgctcctcatagctgaagcctccatattctgggagtcaattgtcaacctaaaaggaagaggctgaggcacaaaatatggttgaaagagtttacttgagcccaagggggccgggcatggtggctcacgcctgtaatcccaacactttgggaggtcgaggcaggtggatcacctgaggtcatgactttgagaccagcttggccaacatggtgaaaccccgtctccactaaaaatacaaaaaattagccgggtgtcgtggtgcccgcctgtaatcccagccactcgggaggctgaggcaggaggatcctttgaacccaggagacagtggttgcagtgagccaagatcgcgtgattgcactccagcctgggtgacaagagcgagactctgtctcaaaaaacaaaaaacaaacgaaagacaaagggaggacggctgccaggaagactcagacccaagtaaccttggatatgagctccattagggctttgttacaagcaggttttcaaaggcaaaaaagggggacagggagtgggctgtgggctgatacaaagttgttaggaattctcattggtttaaaggaagctctttgattagtgattggctatatactgttaagctatagggggtgggttatagtgtccagtgtggcattaccaggttaattcatagctacttatggcaagagcaagccaatgcaagcagttaaagaggtgaatacctagctcaaagggggtaatgggatgtcactgttgtctcattttaattcctctctggccctgatttttttttttttttttgtcacaagatttggctttgtcacccaggcgggagtgcagtggcacgatcttggctcactgcagcctcgagctcctgggctcaagcgatcctcctgcctcagcttcctgagtagctgggaccacaggcaggagccaacacacccgactaatttctgtattttttgtagagacggcgttttgccatgttgcccaggctggtctggaactcctgggctcaagcgatcctctctatgggcctgataattttaaaagccttgcccccctcagataaaaagtttttcttttcctacaagataaggcagatagtaaagggcacgggcctctctttgagctggccttctgtgggctccgggtcaagatcttagtggccaacatcgcagataaacgggggtgggggttgcaatcatgcccacaagcaacagaggaaagagaggagcctcgccctcttccccccacgccccggcccccaagcctgctcactagctctctcctcctccttccacccgcaaggaaccctccagcccacttcctgtgatcctttccggagcccttcagcctggctggctctccagccatctcggaaagcttctctttcctaaaccctccatactcgcaggttcagctacagaggtaactgcaggctcaggttctccagggtggccagcccaccagcccaccgtcccggtgcagcagtgcctctccagcgacagctccaccgcgagcctggcgggctcccgaccttgctccccagcacgtcgtctccaagccacggtctcaccaccctccatcagcctcgggcgacaccaaggggaacagagcgctggagctcctcgaagtcctcccgaccttagcggggctccgttcatcctcccggacgtggccaggccccgctctggccccgcgcccgcccctcccgcggggctgcccctgtctctctgccggagacccggactcagtgagtgagcgcagcgcggccatagggcttcctgcagcggggtctcagcacgtcttctggctggactctggggtctcctggcctggctgtgtctcctggttctcagcgctcgcctcccacgcggggcggagtatgggagtgggctgctcccgcggaagaatcctggggaagttgaggcactggctcccgctgttcagaacactgcccgacgtccccagagctagccactcctccttcccacccacccgcagcactctcgaggtcgcaacggcagtcaccaggtcccggggcctgcgttcagctgcttgatccgactaggtttggcttcggacccgaatgggtcagctccacgcccgatggagtttttcaagctggtgcctgcacgtgcccccgccgcggggcatgaagccgtgggctgcgcccaaactgcctcacaaccaccgctgacccgaagcctctctcactccgtccactgttagaaacctgaagctgccctctgtgagaaagcgttgggattgaatccagacttttggggaaccttaacaataaagaatacaaaatattgactaaaaattggatttgaaagtgaccctgagttgttgttgttgtttttgttttagacggagtctcacactgtcacccagtctagagtgcagtggcgtgacctcggctcaccgcaaccttcgcctcctgggttcaagcgattctcctgcctcagcctcccgagtagctgggactacaggcgtgcgccaccacactcggctaattttttatatttttagtagagacggggcttcaccatatggccaggctggttttgaacccttgacctcatgatctacccccatcgacctcccaaagtgctgggattacaggggaggcactgcgcccagctactcttccttgatttacgacaacccttggttattgtgattgggtcgagatgggtatgtgtcccaatttggatcaatgagttcagagacagttaattcgagacccacccaagagccacttgaatgagccattctctcttcccctggacattgcagtgtgaggatataaggtttggatcagtggctgccattttagtgcagtgagaggcagcttggagttgctggggaggccactggatacagcctgatgaaggagccaacaccacaaaactggaaatggagagacaaggggaaagccaggtccttgttatcatcacttgagttccaggatcaagtctcatctgaagcttttatcttgatttttcagttatttttgtttgtttgtttgtttgaggcaggatctcgcactgttgcccaggctggaaggaagtggcacgatctcggcccactgcaaccctctgcctcctaggttcaagctattctcatacttcagcctctctagtagctgggactacaggcatgcgccaccatgcccagctaattttttttttttttttttttttttagatggagtcacactctgtcacccaggctggagtgcaatggcatgatcttggctcactgcaacctctgcctcctgggttcaagtgattctgttgtctcagcctcctgagtagctgggattgcaggcgcctgcgatcatgccccactaatttttgtatttttagtagaaatgaagtttcaccatgttggccaggctggtctcaaactcctgacctcaggcgatctgcccgcctgggccttacaaagtgctgggattacaggcacgagccactgagaccagcctggatttttcagttctataggtcattaaattccctttatcccttaaaccagtttgaatctcctttcttttattagctacagagtcctaactgattcagataatccacaatacaattgtactcttagctattccagagaggccatttatctcactggcagctcttcctctcctgtgtgccttcctgttcagactctgtggatcacgcaatgaattcccaaatggtaggatgcaaatctgaggtgggcaggtccacctcaagtcggcctgcttgttacaataggtaacttcgccaaagttgcttcaatttggtcctcatcatggcttgccattttatttaagacgagaccaggccgggcgcggtggctcacgcctgtaatcccagcactttgggaggccgaggcgggtggatcacttgaggtcaggagttcgagaccagcctgaccagtatggtgaaatcccgtctctactaaaaatacaaaaattagtttggtgtggtggcacatgcctgcaatcccagctccttgggaggctgaggcaggagaatcgcttgaacccgggaggcggagtttgcagtgaggcaacatggcaccactgcactccagcctgggcaacaagagtgaaacgctgtctcaaaaaaaaaaaaaaaaaaaaaaaagactagattgggcatttagaatgtcagagtgaaaagcaagctggaattacagtgcttcattttgtgaaatactaaataccatcattatgctgctgaaagaaaagctgttttaatgatttttgatttgtctttgtgagagtaaaatcacgacagattgacatggacaattctaaggaaaaaataaataaaagaataccagaatgaaaatacagaacgttgcatgttggtttcattctctcagaagaaactgaggcacaaagaggtcaagtatttcaggttcacagagctagcaattggcagagacagcatttgcatctgacagtctcactcgagagttctggatatattcaaagtgttctggaagcagcatatatatgatgatccatggggacgataaataaatatttaaaaagatttcatatttttaatctttttattttgagacggcgtcttgctctgttgcccaggctggcgtgcagtggcacgatctcagctcactgcaaccttcacctcctgggttcaagtgattctcctgcctcagcctcctgagtagctgggattataggtgtgtgccatcactcctggctaatttttgtatttttagaagagacggggtttcaccatattgtttgggttggtcttaaactcctgacctcaagtgatctgctcacctcagcctcccaaagtgctgggattacaggcattagtcaccacgcccggtaccatatttctactcattatgccctttataaaatatattattgtagatgtttaaagctgttagtgtagtagtacttatatatgattcatggataacatttatatgtgtgtatatatacgcatctacatatcattatatatgtacgtacacatacacacagatacattcacacatacatatatgtgggtatcacaaagtattagttaagtgactctaatactttgaatgtaatattcaaagtattatttgcatgtagattctgaaataatactttgagaatcagcagggtaggggcgggggtcagtgggcagaggagtgggattcccccagaatgaaaggaatttctcatagactcatagttcagcctcatagtttcaccaccgactttgcacttgacttcaattacaaagtcccagggcagaactctggaaggatctagcttgggtcaaccattttttttttttttttgagatggatctcattctgttgcccaggctggagtgcagtggtgaaatctcagctcactgcaacctctgcctcttgggttcaagtgattctcctgcctcatcctcccaagtagctgggaggacaggcgtgcgtcaccatgcctggctaatttttgtatttttagtagagatggggtttctttttttttttttttttttttgagacggagtcttgctctgtcacccaggctggagtgcagtggcacgatctcggatcactgcaagctccgcctcccgggttcatgccattctcctgcctcagcctcccgagtagctgggactacaggcgcctgccaccacgcttggctaattttttgtatttttaatagagacggggtttcaccgtgttggccaggatggtctcgatctcctgacctcgtgatccgcccgcctcagcctcccaaagtgctaggattacaggcatgagccaccgcacctggcctagagatggggtttcaccatgttggtcaggctggtctcgaactcctgacctcaggtgatccgcccgccttggcctcctaaagtgctgagattacaggtgtgagccactgcgcgcccggccgtgggtcaatcattttgagtttgggtcacgtgttcaccactttgcagcccccactggaaccacagtgatgagttttcaggcatcaaccaataggagacaagcatatgtagatcaaaatagtaccattattactggtaaagatgtttgtaaatgtggctttattttctctggtcaaattggctttttaataattcacccttgctgggtgctgtggctcctgcctgtaatcccagcactttgggaggccgaggcgggtggatcacctgaggtcgggagttcgagaccagcctgaccaacatggagaaaccccatctctactaaaaatacaaaattagccggacgtggtggcgcatgcctgtaatcccagctactcaggaggctgaggcaggagaatcacttgaacccgggaggcggaggttgtggtgagccgagatcaccccattgcactccaaactgggcaacagagtgaaactccgtctcaaaaaaaaaaaaaaaaaaaattcacccttgattgcctagtcctggggagcttttactgtgtgaccaagaacaggcaggaacacatgcccgttccaggtgagcaggttgccaaaagagaacccagatgaagctgaaccaccacatgtcccttcatcccaaacccactatgttaattatttgtcccattaatgaaatagctgcatttcttcttctgggaacatggtgggctccctcttagagtgaagtgcaggtatgttacttgctttagccagttacatgtcattagttgtgacgcgtgtcacctccagctgggagctttaagagcctgtggttgattggctgcacaaactctttttccacttgatatggcaacagttagtggtccaggtggtacctgcttcattatcctatgttctggaatgaggacgacatggagaggagccccaagacaacaaacagtgacatggagcttgagcaacgaagaaatatttgctgttttaagcaactgagattttgcagttgcttgttaccacagcataaccttgcctatcctgactgctacattcaccagtcagataaggtgctccatcttctttgcaggaggaaagaagaagaagtagggagagaagttaggggttttcttctatctacctggaaatatgaataggaaataaatgcttcctcctaatacatattattaagctaaggatggaggagcacttcccaaaaggaaaaatggatcagtcaggattatggttataagcagcagaatacaactttggtgatgtttgtagaaaatggtgtttgcggacaggatattggatagtcaccgagtctccagaaaagctggagaatcgagcctataaaacaggcaggagtgtgggaggtaacacagtccaagctaccaccaaaaacactccgcagaactggtctgtcaagcatgcaccgtagattcacacgaccttcacccccccgccactgggtgtcctggtcagcatgacaacaaagcccacagtgacaggaatgctcacaacagatgctgctgcttgtactgctgacagtgccactcctgcccctgctgctgtcaccactgtaaaatagactcttctctgtccctgctttgtgtcactggctcccaagtttaagtccggggacattgtgtctgtttggttgatcctaggtcatgtaattagatcagtagttgggaaagtgaatctttggcttgttcaacttctgcagttggaccagggctgtctccagactaggccttttttttttttttttttttttttttttggacaaagtcttgttctgttacccaggctggagggcagtggtgcgatcttggctcactgcaacctctgcctcttgggttcaagcaatcctcctgcctcagtctctcaagaagctgggattacaggtgtgtgccattatgctcagctgatttttgtatttttagtagagatagggttttgctatgttggtcagggtggtctcgaactcctgcctcaagcaatccatctgcctcagcctcccaaagtgctgggattacaggtgtcagccaccatgcctggccatgaggtctctttagatctggtggctctctgctgcttccaagtcatgtttgggccatgagactattttgggaagctgcccaagttccagtatgtctagatgctctgtaatcatcattccctggtgttggcggcttccctgatggtgctgcaaggagcaagtgcatgtctgtctctgtcctctcaactactctggagcattcttctcatgctgggggcgatccccactcctctgaccactgtccgcctaccctgctctgcagattttccaggatgctttgaatatatccggcgtgagactggacagttcaaatgctggctctgtgacttagagcaaatgacttagcctttgtgcctcagttttttctgctgaaaaacactgtaataggccgggcgcggtggctcacgcctgtaatcccagcactttgggaggccgaggtgggcggatcacgaggtcaggagatcgagaccatcctggctaacacggtgaaaccctatctctactaaaaatacaaaaaattagccgggcatggtggcgggcacgtgtagtcccagctactcgggaggctgaggcaggagaatggcgtgaacccgggaggcggagcttgcagtgagccaagattgcgccactgcactccagcctgggcgacagagtgagattccgactcacaaaacaaaacaaaacaaaacaaaacaaaacaaaacaaaacactgataataacagttcttacctgtgttcatttgggttctcccagaagcacaccctgagacaacgatttgagaacaggtagttaacagggaggtaaccccatgatacaatagtaaaggtgtaagaaactgagatagggaagggaagaaagtcagtaaggtggggtacaaaaccagtttctactatgagcaactagagattgatcccactggggaactctgggtgacagcatagagcagggttgaacaaactgtggcctgggccataaaatagttttatcagaacagctgctcctattcaattatatatggtctgtggctgatttcacagtataatagccaagtggaatagttgtgatagagactgtatggcttgcaaagcctaaagtatttacttatttatttttaacttttttttgtttttgagagagtcttactctgactcccaggctggagtgcagtgacgcgatctctgctcatttgcaacctccgcctcccgggttcaagcaattctcccgcctcagtctcctgagtagctgggattacaggcatgagtcaccacgcctggctgtttttttttttgttttttgttttttttgtatttttagtagagacagggtttcaccatgttgtccaggctggtcttgaactcttgacttcgtgatctacccacctcggcctcccaaagtgctgattacaggcgtgagccactgtgcccggcctattatctggatttttttttttacagaaaaagtttgtcagctcctgatgtaggacatgtgttagagatatcccaacctaggagcaaggaagctaggaaatttgtcaattctccctgtgttactagtggatggcttcccttcagctctcttctcctccttccacctttcagtctccgtcttctaggcttttgcttgtgcaacatcaaggccaatgacagttacatttacttttgtggctataattaagtcttccttgctttgtccatctgttgattctaagagttgaaaggcaatgaacagtgtttaccttatacattgtgactatataaatatcttttgttgcagagctagtaatcacttagattacatttcctttcttgaactatttgtaattaccttctgaaagacaatgtttgatacattcacaagatattatgaaatctatgttagctgtaaatgattataatataataaatacctggccaggcacagtggcttgtgcgtgtaatcccagcacgagctgtaatcccaggccaaggcaggaagatcgcttgagcccaggtgcaccaccacacctgtagtcccagctacttgggaggctgaagtgggaggattgcttgagctcaggagttcagctatgatagtgtcactgcactccagcctaggtgacagagcgagatttgtctcaaaaaaaaaaaaaaaaaaaaaaaaaaaaaaagaatatgcctgcacctatcacccaactcaggaactagactcttattaataatgcatatgtgctcgtgtaacattcctcatctcactcctatgccttcttgagaagtaaccatcatatgatatttcatgtttactgtgccactgctttttaaaaactaccatgcaatcataagcttacataagcttaaacaatgcattggttgttgagcttggttataggctctataaaaatggcatcatatgtactgtgtagtcttctgggggttacatttttcaggaaacattctatttccaagattcttctgtgttgtgtgttgctgtgagaaatgcttattattaaaaacccttagaaactccaggaaaaagctgggtgcagtggctgatgcctgtaatcccagcactttgggaggccgaggcgggtgaatcacgaggtcaggagtttgagacccacctggccaacgtggtgaaagcccgtctctactaaaaatacaaaaaattagctgggcgtggtggcgggcacctgtaatcccagctacttgggaggctgaggcaggacaattgcttgaaccggtgggggcacaggttgcagtgagctgagatcacaccactgcactccagcctgggggacagagtgagactccgtctcaaaaaaaaaaaaaaaaaaaaagaaactccaggaaaaacttaaaaactaaagaggattcgagggaggaagcccaatcctgacgacactggctctgtgtaaatgacattcccagcaggcccaccaccccctctcccagtgttctcccctccttctcccatcttcaagattctgtcttctggctgggtgtggtggctcatgcctgtaatcccagcactttgggaggccgaggcgggcagatcacgaggtcaggagatcgagaccatcctagctaacacggtgaaaccccatctctactaaaaatacaaaaaattagccaggcgtggtggtgggcacctgtagtcccagctactcgggaggctgaggcaggagaatggcatgaacccgggaggcggagcttgcaccactgcactccagcctggacgacagagtgagaccctgtctcaaaaaaaaaaaaaaaaaagattctgtcttctgacccagtgccccaactgtagctgcttgttctaaggatgacactcgtccctggcagggccagagaatgcttggacttgggactgagaggtctcccctccagcagctggaggggtctgatacacagcttggagtgtgagggccatgtttcccaccatgtggaccagagcagaggaagaggctggtctgcagagacagaggaagacgcccagggaggggcagagaccacagccagaagaagcgccctcacaggctttgaatttcaactttcaaccattcctgaggtcccactgcacaggtgacatcaggattcatagttcactctccttttgcttacaaggagagttaatttggagagttaatctgttccatgatttgcagatgccactgactggcaaggatgcttgccaggaattatcttctgcatttttgctctttccctgtttgctagtgaaagactgtaaaaacaattaaaatgataatttaacaacataattaccagttgctgggaatttactatgaactagtgagtgctttttgatcattatctcattcagcactcttaccaagtctatgagaaaaatattgttcctgtgttacagatgagtaaactgaggcataaggaagctatatgacatccaggttcacagggctattaagaggaagacccggctgcatgtggtggcacacacctgtaatcccaagactttgggaggctgagacaggtggatcacctgaggtcaggagtttgagaccggcctgactgacatggtgaaatcctgtctctacaaaatacaaaacattagctgggcgtggtggctcattcctgtaatcccagctacttgggaggctgaggcaggagaattgcttgaacccaggaggcggaagttgcagttagctgaccaagatggcgccattgcactctagcctgggcaacaagagtgaaatcccatctcaaaaaaaaaaaaaaaaaaaggcggggaagacccatttttcatacctttgcctgttggaccccaaagcctatgttctttttttttagacagagactccttctggcctgagtgatgaaggaagactgtctcaataaataaatacataaataaataaaattataacaatctcagaaggcatgacacctctaggacccattctcatcctacatcctcctctttctggtgctgagaaaaaaaagaaaggaaaaagaaaagtcaaaagaagagggaaggaactggtggtgattgactagcagtgagtagagctgggagggaggtgaagggttggggaaagcaatgggaagctcgatgacatctttgcaagacatgtccaaagaacaatggagggaggatcttttcctggggataagctcctgctccctccccctgctccatcagtgagcatttggggttggggttagggcagaggaactaggaagagaaaaggggactgtcctagtccattttgtgttgctataacagaatacctgagggtgaataatttataaagaaaaaagggctatttggctcacaattctgatggccagaaagctcaagattgggcatctgttgaggacgtcaggctgctttcacttatggtggaggcaagggggagctggcttgtgcagagatcacaaggtaagggaggagctgaaactgtgccccaaacagttaaataaaccagtgattaacagacattttcgagtttacaggatggcagctaagaaacagcttgctgaaatgctgaaaaatccctttgcttataacaggactggctgaaatcagtgggaacccgtatggctgacagcaatccgcacagaacgagcttgctgatgtcacagcctgaatttccacctgctgtttcatactaacgccaccaaatttgcacatgcaacccacgaagaaccttggagataaccagacatgattaaggactttctagacttctcctttctttccaccaatcacccgctaatcccagaatcctccccctaaaccttttctaataaaagtactgccttaagaccagcaaagagagacagatttgagctggattcccgtatcctcgtgggtcagctcacaataaagctttccttttctcaaaacctagtgccctagtattggagtattggcttctatgcacatctggcagcgagcacttttgcttggtaacagcgccaggttctttttaacaaccagctattgcggggagctaatggagtgaggtctcagggaaggcgttaatccaatcacaaggcatctgcccccatgacccaaacaccacccactaggccctctcacctcccatcaccaccacactggggagcaaatttcagcatgaggtttggtgaagacaaattaaccatatgcagaccacaggagggcctctcacataccattgctcatatgtaaagggaggcagaagctggagggaggtgtcagatccacagttctgagctgtggcctgagaaacaggatttccggaaagagttagagctggagccacaggccaggcaaggtggctcacacctgtaatcccagtgctttgggaggccaagtggggaggatctcatgaggccaggagttttttttttttttttttgaggctgagtttcactcttgttgcccaggctggagtgcaatggtgcgatctcggctcaccgcaacctccgcctcccaggttcaagcaattctcctgcctcagcctcctgagtagctgggactacaggcatgtgctaccacgcccagctaattttgtatttttagtagagatggggtttctccatgttggtcaagatggtctcgaactcccgacctcaggtgatccacccacctcggcctcccaaagtgcagtgattacaggcgtgagccaccgtgcctggcagaggccaggagtttgagaccaggctgggtaacatatcaagaccccatctctacaaacaattgaaaaattagccaggcatgctggcacaatcctgtaatcccagctactcaggaggctgaggtgggaggatcacttgaacccaggagttcaaggttgcagtgagccaaggttgtgccactgcatcccagcctgggcaatagagggagaccctgtctctctctctaaaaaaaaaaaaaaaaaaaaaaaaaattgctgaagacttggcttccctcccccatctcactgtgccccaggaaaattccgtggcagttaggggacctggcctgctgaatgggttggggccttctcttggatcaagagtctcttatttgatcgaggtctgttattagacttcctcattctttctcagacctcaggctgcatggtggcagctgatgaaaatatccaaaagatgagaagagacaattgagtctggtgagggaaaggggagacagagggtgaagtggtgctcaagatggatgcagagtactctgggaatgagttccccaggtcagaaggagaaagagaccaacatcagagacctggaaaggaaaggaagagtggggaggcaggatggggcacaggtgagctgggacaagatgggagactgctgtcctccaccctctccctcagtagtaacaggtccttgggccagcgccagaactctccgctgccctttcaatggagaatcacacacagcttccgctggatggcccaggtgttggcctctgagctcagcctggttgcctttatcctactattggtcgtggccttctccaagaaatggctggacctctctaggagcctcttctaccagcgctggcccgtggatgtcagcaacagaatccacacatcagcccacgttatgtccatggggctcctgcacttttacaaatccaggagctgttctgacttagagaatgggaaaggtgagcccctccaccccccatcccagcccaggccgccagcctgtcttggcctctgtatctgcaccctggatgtattcttgttccctctttctggtcatctttactttttggcctgcaagatggttccactggcactgagacctccgatgatcgtttctcatcctgtagcctggctaaatagatttgattggtgcaatggaaaatgtcactgcttttgataaaacccagagccaaatctgtgcttctaagaatgctgtgagagagttgggcatggtgctgcacacctgtagtctcagctatccaggaggctgaggtgggaggattgcttgggcccaagaatttgagtccagcctgggcaatttagtgagactcctgtctcaaaaaaaaaaaaaaaaaaatcaggctgggcactgcgtctcacacctgtaatcccagcactttgggaggccaaagcaggcagatcacctaaggttgggagatcgagaccatcctggctaacatagtgaaaccccgtctctactaaaaatacaaaaaattagccaggcgtggtggcacatgcccgtaatcccagctactctggagactgaggcaggagaattgcttgaacccgggaggtggaggttgcggtgagccgagaccgcaccattgcactccagcctgggcaacaagagtaaaactctgtctcaaaaaaaaaaaaaagttacgaggggcatggactcagcacaagagaatcattcattaatcgcctaatttaccagggacaagagccccagtgagatgggggtttccttagtcttgtgtacccagagctttgagaggactccttgcaatgtcccctctcaggccctgatcccacacattctcctttccttctgcctcaggccttgcttttctggatcattttcctttttccacatctggcttctgtgttccttctttccctgaattcttgcagctgcttcattcctcatccttgtttttttctgtttgtttcgctgatttttttagagacaaggtctcactctgtcacccaggctggagtacagtggtgcaatcatagctcactgcagcctcgaacttccaggctcaagggatcctcctgctttaacttccggagaagctcagactacaggccgtggccaccacacctggttcttattgttgttagtctctggttatgctgttccctcacccctcaggaatttggagttctttccctgctcctggggaaaaccagagcttttgacccttatttccattttttcactctccttagcatgaaaaaaatcacacagctattattttctgaaagtattatgtccttatcatatgaatatgaaaatattcatataatgaattatgaaagcattatgaaaatattatgtccttattataataaatttggggaaacaaaagctatcctttattgtacacttactccatttgttcaatttagtccttagtcaatcctaagggatagggataattatccctattttagagatgagaaaattgggactcagagagattaagtaccttgctcagggtcataaagctatttagattgaaccaaatgacatgctaatatttgactgcttttcacctacaaaaggagaatttcacatggatcaacctaataatggcagggttggaattgcaactcaggtgtgcctggctctaaaactcacataggcgccttgctctacggagttactcaaagacagccaggctttttatttttatttatttatttatttgagacagagtcttgctttgttgcccaggctggaatgcagttgcggtctcaggtcactgcaacctctgcctcccggtttcaagcgattatcctgcctcagcctcccaagtagatgggattacaggcgcccaccaccatgcccagctaatttttgtatttttagtagagacggagtttcaccatgttggccaggctggttttgaactcctgacctcagatgatccgcctgcctcggcctcccaaagtgcctcggctcacggattacaggcgtgagccaccgcatccggccaaacatcactgatttttaaaatttatttaattaggattaggtgtgtataaacagtgaaaattcaaagaatacaaaagattgtatactgaagtgagtctgttatctcttagtatccagtctccctccctagtttctcctgtttctttccagagacactctattcagagacaagcatctatttttatttttattttgagacagtgtctcactccgtcacccaggatggactgcagtggtgtgattgtagtttattgcactgcagcctcaaactgctgggcccaagtgatcctcccaccttgaagctcccaagtagctggcaccacagatgccaccatgcctggctacttttttttttttaatttgtagagaccagggtctccctctgttgcccaggctggtctccaactcctgggctcaagtgattctcctgcctccacctcccaaagtgttgggattaccggtgtgagccattgtgcccagtctatcacctatcaccattttaaatgaacacacaataacacaatgtatggggatagtataatttattttacaaatctcttctaaatcaaggagcttattggacatttttttttttttttgagatggagtcttgctctgttgcccaggttggtgtgcagtggcatgatctcggctcagtgcaacccctgcttcctgggctcaagtgatccttccacctcagtttccccagtagctgagactacagacaggtgccactacacctggctaatttttgtatttttagtagagacggggtttttaccatgttggccaggctggtttcaaactcctgacctcaagtgatccgcccacctcagcctctcaaagtactgggattataggcgtgagccagcacacccagccgacatattaatatctctgcaaagaagattcctgtactgagattttgctgcagatctctgattattccttaacataaattccaagaagaagcattgtagggtcaaagaatgtagattttctggatcttttgtaccagatcattcaccacaaatgctgcccaccaggagcgtatgagaggacctcttttctctacatactctcctatactaggtgttatcaatcttattttgatctttgctaatttgacagtttatatatatgtatgtagagatggggtttcaccatgttggtcaggatggtctcgatctcctgacctcgtgatctgcccacctcggcctcccaaagtgctgggattacaggtgtgagccaccgcacccagccaagtgtgtgtgtgtgtgtgtgtgtgtgtgtgtgtgtctatatatatatagactgcaacctcagcttcctgggatcaagcgattctcttgtctcagcttcccagcagctgggattacaggcgcatgccaccatgcccagctaatttttatatttttagtagcgatggggtttcaccatgttgcccaggctggtctcgaactcctgatctcaagtgacctgcccacctcggcctcccaaagtgctaggattacaggggtgagccactgcacccgacaccaattgtatatttttaaagagacagggcctccctatgttgtccaggctgctctcaaaccctcaggctcaagagatcctcccacctcagcttcccaaagtggtgggattacaggtgcgagccaccatgctcagcctcgatggtttttcacaaatcacatttaattagcaattctttgtgttgagctttatatgtttatcagacatttgtactccttctttggagaattgcagtttaagtcctctgtacattttttctgttgaggtattcatttgcatgtggttgaggttatcaaacaatatccatatcaaggatctcggattgtttaagaagtgaaagcaatatttcatttttatttcaaatgtgcatttctctgattattaatgggtctgtacattttctttctgtcttttttgttttttgttttttgcaggcggcgtctcgctctgttgcccaggctggagtgcagtggctcaccacaacctccgcttcccaggttcaagcgattctcctgcctcagcctccggagtagctgagactacaggcatgcaccaccatgcccagctaatttttgtatttttagtagagacggggtttcgctatgttggccaggctggtcttgaactcctgaccttgtgatccacctgcctcggcctcccaacgtgctaggattacaggcgtgagtcaccgcgcctggcggtacattttcttgtatttgctcatttgattatgtttcatcttttgtaaatccttagttgatcttgtttgtttgtcattttccccaggcagttttaagctgtggacaatcagcccatgtttaaggtggctaagttaagcttcaacctgaccctggggctgggcctcgtcctcaccatctggttgcacctgccctacctgcccgctgttcaaaaattgccctttgtgggcttcgggaccatcttgagcttctgtgaaggtgcctcctagctctggaaaggtcctttgttttcctaacccccatcttcctgggcacttctccctcttctttgggggtggtatgagggttttgtgggtggtgggagaacagaaccgagaatcgagttacatcatttcttggtcacaggagaggtagaaatgcaggggttgactcctggaacctcagggccagtcactctgtgtgtggtgatgtggtttgtggctgtagcctagcagatgaggaagaacctcctgtgggactcttgtatgacaatgagaccctctgcctcctgtctcctagtcaccttcatcttctccaccctcatgctattccccattaacatctggatcttcgagttggaaaggaatgtatccatccccataggctggagctatttcattggttggctggtgcttatcctatacttcacctgcggtgagtggccagagggccctgggggaaggaagcgacatgggtagggtagggcagggaaagtgtggagggaagaggctggcaatccccagggctagatttttagggtcttatcttccctttggtctcaccctacttgtcacttaacctcccagtcacaactttcctctcccctgtccctgtcctttcccagcgatcctttgctacttcaaccataaaagtttctggagtctgattctgagccaccccagtggtgccgtgtcctgcagcagcagtttcggctcagtagaagaatctccaagggcacagacgatcacagacacccccatcacccaggagggagtcctggatcctgagcagaaggatacacatgtgtaatcttttctgaactcctggcaccaagttctgtccattcatctgaccccatctcctcatcctcccccagcccttgaataggttggtcctcatcattgcaaggaatgagaaagggaggattttgcactcctctgctttctccctgccttgattgagcttgagtgatgtggaataaattgtccgtctcttctttctcatatctggctgttgttgaggcaagctagaggaggagggagaggaagggagaaagaacaagtttgttttccagttcttcctgcccaggagccttttggcacccgttagtgcctaaacctgcccaacctctaccagaacatacttgtacatgggcaaacgcctctggagagctaaacctctttttactttgttacccctgacccaacatttgctagttagtgggtggaggaggtagagctgattaggagacagatatcacttgccaacttgttggcttaagcatagtgaaggattcaaaagccaaatggctcaaagataagaggcaggttaaacaaggagcaccacagcacaagtggtcagcccaggtgtgtgtcctgggcagcagtcccaccctctgtgtccagctccgatgacagagcgcatagagcctgtgccctggaaaccaccactaccaccatccccccaggctgctatagctttccacccaagcctcccacaccctccaccatgtaacagcaggaataaaacatggcaacaaaggaaagcattagggttaggtcctaagaccaaaaggtaagttgcatatttgggttttaaagttagcttggggaatgctggcaatgcccatcaggctttggacatgttgcccagagaggccagcctcctaggagagcatccatagctgatcttggtcatgtctatccctccagatgaaaccacaatacatcctgctgattggtagagcccagtggtctgttttgatagggcgctgattggtgcgtttacaatccctgagctagacacaaaggttctccacgtccccaccagagcagctagatacagagtgttgattggtgcattcacaaaccctgagctagacacagggtgctgatcggtgtgtttacaaaccttgagctagatacagagtgccaattggtgcatttacaatcccttagctagacataaaggttctccaagtccccaccagactcaggagcccagctggcttcacccagtggatcccacaccggggctgcaagtggagctgcctgccagtcccgcgccgtgcgcccgcactcctcagcccttgggtggtcgatgggactgggcgctgtggagcagggggttggcgctcgtcagggaggcttgggtcgcacaggagcccacggagggggtgggaggctcaggcatggcgggctgcaggtcccgagcactgccccgcgggaaggcagctaagccccggcgagaaatggagctcagcgccggtgggctggcactgctgggggactcagtacaccctccgcagccgctggtccgggtgctaagcccctcattgcccggggcctgcagggtcggccggctgctccgagtgcagggcccgccaagcccacgcccacccggaactccagctggcccgcaagcgccgcgcgcagcccgggttcccgctcgcgcctctccctccacacctccctgcaagctgagggagccgactccggccttggccagcccggaaaggggctcccacagtgcagcggtgggctgaagggctcctcaagtgccgccaaagtgggagcccaggcagaggaggcgccgagagcaagggctgtgaggactgccagcacgctgtcacctctcacagggacaaattgtgagtggatcaggtatgttaaaaatatatgtattaggttgggccgcgtgaggtggctcatgcctgtaatcccagcactttgggaaaactaggtgggcggatcacttgaggtcaggagttcgagaccagcctggccaacatggtgaaactccgtctctactaaagatacaaaaattagccgggtgtggtggtgcatgcctgtagtctcagctacctgggtggctgaggcatgagaatcgcttgaacctggaagatggaggttgcagtgagccgtgatcgcgccactgcagattgaaccatatatgttgtgttagtagttaaatgtggcaattttatatggttcaacctaatgtatatgatcgactttatttatttatttatttatttatttattgagacggagttatgctcttgttgcccaggctagagtgcaatggtaccatcttggctcaccgcaacctctgcctcccaggttcaagcgattctcctgcctcagcctccctagtagctgggattacaggcatgcaccaccatgccggctaattttgtatttttagcagagacggggtttctccatgttggtctggctagtcttgaatcctgatctgcccgcctcaggtgatcggcccgcctcagcctccaaagtgctgggattacaggtgtgagccaccacgcccagctgacttctatttaatatgagccctgtctgagattcttgttcttaccacacctgatcagcaattgtagcattcctaacccaggaaagattcctaacaaaggaaagattctgagcaaggaacataatacaagggcttgaaaattaggcacaacagatattccacaaatctctactctgtatcccactttaatcctctccccagtagcgaacaaggatttactaggggacttactgaactagtcatcctggaggaagggacaccaaataaaggaatgtcatggtctctgccttaggtacaaacacacgtatgtataatgtaattagagaaactgacttagtgattttgtaggggtcacaaactcaaatgcatacaggggctaggtgggtaacataaataaagggggccactctcacagtctgtatataatttttcccttttgataaagatctggtgtattagctatttattgctggataacaaattaccccacatttagtggcttaaaataataaatatttattatctcacatcatatctgaaggccaggaatgtaaaagcagcttagctgaataatttgtcaaaattatttaaaaaattttaaaaaacttttaaaaattattttatcatatacaacatgatgttttgaaataggtttacattgtggaatggctgagttgaactaattaatgtatgcattccctcacatactattttttgtggtgagaacacttaaaacctactatctcaacgtttttcaaaatgcaatacattgttattgactatagtcaccatgttgtacaataggtctcttgaactcattcctcctaattaaaatcttatagtttttttttttttttttttttttttgagatggagtctcgctgtctcccaggctggagtgcagtggcgcgatctcggctcactgcaacctcacgccattctcctgcctcagcctcccgagtagctgggactacaggtgcccaccaccacgcctggctaatttttttgtgtttttagtagagacggggtttcaccgtgttcaccaggatagtctcgatctcctgacctcatgatccacctgcctcggcctcccaaagtgctgggattacaggtgtgagccaccgcgtccggcattttttttttttttttgagaccgagtttcactttcattgcccaggctggagtgcaatggtgagatcttaggtcactgcaatctctgcctcctgggttcaagcgattctcctgcctcagcctcccgagtagctgggattacaggtgtgtgcctccatgcccggctgattttttgtatttttagtagagacggggtttcaccatcttggtcaggctggtcttgaacctctgacctcaggtgatccacccacctcagcctcccaaagtgttgggattacaggcatgagccaccacacccggcaatcttatagtctttgaccaatatctcctcagtcacatcctcccccagcccctggcaaacaccataatactctttgcttctatgtgtttgactaaattagattctacatgtaagtgagatcatgcagtatttgtctttctgtgcctggtttatttcacttaacataatgccatccaggttcatccatcttgttgtaaatgacaggatttccttcttcttctttttttttttttctgttgagacggagtttctctcttgtcgcccaggctggagtgcgatggtgtgatcttggctcactgcaacctcgacctcatgggttccagcaatttttctgcttcagcctcccaagtagctgggactgcaagtgcccactgccatgcttggctaatttttgtatttttagtagagacagggtttcacaatgttggccaggttggtcttgaactcccgacctcaagtgatccacccgccttggcctcccaaagtgctgagattacaagcatgagccaccacgcctggcctgtggacatattttattaccattacattttggtataaaaaatatcttacaataggagggcataattagaaatggcaactggaatttcattttaattttgggagacaagtgggattgggatatcccggaaaactgccttatgtaacaggggaaggtgcaactcagctccatgggttattgctgtgaggaacatttgtcatatggagctgctcagcattcatatggttttcctatttggggagaatgtcaacataagtgggaagtggagtcgcttccaattatagaaggtgcaggaggggaagacacacctgggaccgctctcaggcagtcagagtgccaacgtatgactaagattattcacctgcggcagggcacggtggctcatgcctgtaatcccaacactttgggaggccgaggtgggcggatcacttgaggttggaagttcgagaccagcctgaccaacatggagaaaccctgtctctactaaaaatacaaaattagccgggcgtggtcatgcatgcctgtaatcccagctactcgggaggctgaggcaggagaatcacttgaatctgggagggggaggttgcagtgagccaagattgtgccgttgcactccagcctgggcaacaagagcaaaactccatctcaaaaaaaaaaagattgttcacctgcgactttgtatccttttcattaagtgcaaagaattaagggaatattggaatcactgtagtccatgcaggatcctgcatcctgcagcagaggtgacagggccattgtctaggggggacagcacagggtttttctcccagaaaactcatgtggcatgactagggttgtagctctggctgcttagcctcccttggttcttactcctctaagcctgttcttcagctttctgtaagttatttcatatccttccttttctgcttaagttaaccagggttgatttctgttgtatacaaccaaaaaccttaaatagaatatttgctagagcttctgattttttcaaaagatgccgccaatccagatgtttttataaattctgatctttaaattttattactataatttttttttagagagagactcttgccctgtcacccaggctggagtgcagtggcatgatcatggctcattgcagcctcaaactccttggcttaagcaatcctcctgcctcagcctcctgagtagctaggactacagggatgtgccaccatgcccggctaatttttatttacaaaacgttttttgggccaggtgcggtggcccatggctgtaatcccagcattttgggaggccgaggcgggtggatcacttgaggtcaggagttcgagaccagcctgcctaacatggcaataccctgtctctaataaaaatacaaaaattagctggtcatgaggccgggcgtggtggctcatgcctgtaatcccagcactttgggaggccaaggtgggcggatcacctgaggtcgggagttcgagaccagcctgaccaacatggagaaaccccatctctactaaaaatacaaaattagccaggcgcagtggcacatgcctgtaatccaagctactagggaggctgaggcaggagaatcgattgaacctgggaggtggagtttgcggtgagccgagatcgcgccattgcactccagcctggacaacaagagtgaaactccgtcgcaaaacaaaacaaaacaaaacaaaacaaaaaaaattagctgggcatggtggcgggtgcctgtaatttcagctactcgggaggctgaggcacaaaaatcacttgaacccaggaggtggaggttgcagtgaaccgatattgtaccactgcactccagcctgggcaacagagcaagactctgtctcaaaaaaaaaaaaaaaaagtgtttttggagatggtgggggggggatctcatcctgttgcccaggctggtctcgaactcccagcatcaagagatcctcctgcctcagcctccccaagcactgggattacagccatgaaccactgtacccagccaaaaatttattttaattgaatgtcttggtccatttgtgctctataacaaagtacctgagattggataatttataaaaaacagaaatttatttttcacagttctagaatccgggaactttaagatcaaggcaccagcagactcagtgtctagtgagggcttgctctctgtttccaagatggtgccttcttgttgtgttttcacatggcggaagagagggaagggccaagcaagtctctgaagccttattttaaaaaattagggccaggtgtggtggctcacgcttgtaatcccagcactttgggaggccgaggcaggcagatcacctgacgtcaggagtttgagaccagcctggccaacatggtgaaaccccgtctctactccaacccaggctggagtgcaatggcgcgatcttgactcaccacaacctccgctttcatgcgcgtccgtgtgaagagaccaccaaataggctttgtgtgagcaataaagctgtttatttcacctgggtgcaggtgggctgagtccgaaaagagtcagcaaagggtggtggattatcattagttcttataggttttgggataggcagttaagaagttaagagcaatgttttgcgggcaggggtggatctcacagagtacattctcaagggtggggaaaattacaaagaaccttcttaagggtgggggagattacaaagtaccttcttaagggtgggggagattacaaagtacattgatcagttagggtggggcaggaacaaatcacaatggtggaatgtcatcagttaaagctatttttacttcttttgtggatcttcagttacttcaggccatctggatgtatacatgcaagtcacaggggatgcgatggcttggcttgggctcagaggcctgacaccgcctcctgggttcaagtgattctcctgcctcagcctcctgagtagctgggattataggcatgtgccaccacgccccgctaattttgtatttttagtagagacagggtttctccatgttggtcaggctggtctcgaactcccgacctcaggtgatccgcccaccttggccttccaaagtgctgggattacaggcaggagccaccgcacccagcctaggattgggtattctttcttccttacctatttggtgtattgtgtcagcttagctaaactgcaactattttccagaagtctcttcctgcagtgtttcaggttagcttgagccacagagatatttggtaggagatttggaagtggatgtggagcatttaattactagtgttaattccctgtgccacagtaacgacattcaaggtggtggctgatctgtcaccctgggtgctggaatgaggagacatggagaggagcccacagcagatacttgatggataggtagtgctatggactaaaccgtttctccctgaaatttgtatgttgaagcctttactcccaatgtggctgtatttggagatagggctttttaggaggtaattagggttaaatcacgtcataagggtgggagccctatccgataggattagtggttctttataagagacaccagagctgtttctttctctctgcaaacatgcactgaagaaaggccgtgtgaggacatagctagatggcagctgtctttgagctaggaaggaagccctccccaaaaacggaatcagccagaacctggatcttgaatttcttgcctccagaattgtgagaaaaataattctgttatttaaggcgcccagtctatggacttttgcaatggcagcctgagcagaccaagacacacggtgtgggtgagaatttaacctggttattgtaagcatctaggattttagggttgcttattaccttagcattactgagactgctgatggacacaacttctttggctaaagggaagataaaaatagactgaaactaaaattgttctgctttacaaagacaactcccgatccgcagacctcaatttgaattacaatcagacagcaaggcttgaagaggctggcaatattccatcagagagaacaataaatgtatgaagtctgaataatgaaggaaacatttacaaatacacttgacagaagaagaagggaggcagggtggtggctcacgcctggaagcccagcactttcggaacccaggacaggcagattggttgagctgaggaattcgagatcagcctgggaaacatggtgaaaccccgactctacaaaaaatacaaaaattagccgggcacggttgcacaggcctatagtcccagctacaagggagactgaggtgagaggagtgcctgagcccaggaggtcaaagcttcagtgagccaagatcgcaccactgcactccagcctgggtgccagagtaagaccctgtctgaaaacaaacaaacaaacaaaaaaaaaaaaagaaaaagaatgtaaagattttaagatacagcacagttatgcttttgatgatcatgtcttcgttcctcaatatagattagaatttacagtagttccctcactatctggtatttccttattatcagtagttctctcattatcaagaaatccaagatcaaggtatctggtggttttgcttcgctttccatggtgtcaattacccgtggtcaactggggtccaaaattattaagcatggccaggcacagtggctcacacctataatcccagcactttgggaggcccaggtgggtggatcacttgaggtccggagttcaagatcagcctggccaacatggtgaaaccccgtttctactaaaaatacaaaaattagctgggtgtggtggcgcatgcctgtagtcccagctactcgggaggctgaggcaggagaaccgcttgaactggggaggtggaggttgcagtgagccgagatcgcaccactgtactccagcctggcgacaaagcaagactctgtctcacaaaaaaacaaaaacaaacaacattcttaggttttattagtttcctcaagtgactgagtgctaagcatattgattttgattttcacagcactggagtaagtaaacttttatcttgaaaacagctttttttttttcttttaaaaatctctattgttgttagttcaatagtttgtagtctctggctgtagccaagattagccagccagctctgaaacagagacatagaaatagggtaaataaaaaccaagtgttgggccgagcccagccatggggcaggctgaggcaggaggattgcttgtggccagtagttcaagatcagcctggacaacatagtgagacactcaagtgtctcaagagtatgaaaagacaaagcactcactgggacaaagtatttgcaaaagacatatctgataaaagactgttttcctcagcaggcaaagaattcttaaaactcaactaaccaatttaaaaatgtacaaaatatttaaaaatatgcaaaagatctacagacatctcgccagagatgatatacatatggcaaataaccatatgaaaggatgttcaacatcatatgttctcaagggaattgcagattaaaacaatgagataccgctgcatttatttgaatagttaaaatccaaaatactgacaacaccaaaagcaagtgatgatgtggaataacaggaactctcattcattgttggtgggaaggcgaaatggccagcaacattggaagacagtttggcaatttcttttcttttttttttttgggacagtgtctccctctgttgcccaggctggagcgcagtggcacaatcttagctcactgcagtctccgtctcccacattcaagcaattctcccacctcggcctccaagtagctgggattacaggggcgtgccaccatgcccggctaattttttttttgcatgtttagtagtaacggggtttcaccatgttggcctggctggtcttgaacttctgacctcggcctcccaaagtgttgggataacaggcacgagccaccgtgcccagcctggtttggcaatttcttaaaaaactaaacatacttttttattttttgagatggagtctcactctgtcgcccaggctggactgcagtggcgcgatctaggctcactgtaagctccacctcccgggttcacgccattctcctgtctcagcctccacagtagctgggactacaggtgcccaccaccacacccggctaatttttttgtgtatttagtagagacagggtttcactgtgttagccaggatggtctcgatatcctgacctcgtgatccgcccacctcagcctcccaaagtgctgggattacaggcgtgagccaccgcgcccggccaaaactaaacatactcttaaaatacaatctcgtgattgttgtgctcctatttactcaaatgaaccaaaatctgatgcccacacaaaaaccacacacaaatctttatagcagctttattcataattgccgaaaattaggagcaagcaagatatccttcagtaggtgaatgcataaactgtggtatatccatacaatggaatattattcagtgcaaaaaagaaatgaactattcaagccacaaaagacgtggaggaaacttaaatacacattgtgaagtataagaaggcagtctgaaaaaggaacatactatatataacattttggaaaaggcagaactatagagagtaaaaagatcagtggtttccaggagtttggggagtaggaagggagggatgaatagctagctagagtacaggggatttttgggatagtgcaactattctgtatgatactttaatggtagctacatgtaattttacatttgtcaaaacccatagaatgagccaggcatggtggcacatgctgtagtctcagctacttggcaggctgaggtggaaggatcacttaggctcaggagcttgaggctgaagtagaccatgactgcgccactgcactccagcctgggcaatagagtgagaccctgtctctaaacaaacaaacaaacacaatagaatgcatagcacaaagagtgaaccctaatgtaaactacagatttgcagaggcaggagaattgcttgaacccgggaggtggaggttgcagtgagccgagatcacaccattccactccagcctgggcaacaagagcgaaactccgtctcaaaaataaaaataaaataaaaataaagtccattattaaacaacaaaaaagcaccccaaaaaccaagggccaagaaagagggaatattatttttcttttctttttttttttttggagacagagtctcgctctgttgcccaggctggagtacagtggcgcaatctctgcaacctctgcctcccaggttgaagcgattctcgtgcctcagcctactgagtagctggggttatagatgcccgccacctcgcctggctagtttttgtatttttagtagagacagggtttcagcatgttggccaggctggtcttgaactcctgacctcaagtgatccactcgcctcggcctcccaaagtgctgggattacaggcatgagccaccacacctggcctaattttctataatggagaaaacacaaggcttatgattttctgcttccacaaagcatttggcagaaataggccaggaatccctattttgtagccaggggaaaggaagaattgttctcggtaggggaccactctctagggtgaagcctggtcagtgccatagaaactgtccttggtatttctgagaattctgggtccatgcttggttagctgagaaacttgtcagacaccatattctagtgagtgcctggaagatacctgtgaacagaaggggaaacgacacaaggcctgggggctttcaggcagcttttgggatctgctacataaaatgccaggacttgaagacaagtgactctcactcacatgaatactgcctttgcaggccaaagagcaaactgccaagttactgccctgtatttccatgttcaaagctgtctctcctctttggtgggaccttgtcaattcttctttttttggacgtaattgtagagttacagaaaagttgcaagaatagtacaaagaattcccactcttcacccagattccccaaatgttaacattttactgcattttttttttttttttgagacagagtcttgctctgtcaccaggctggagtgcagtggcgtgatcttggctcactgcaacctccgcctcctgggttcaagcaattctcctgcctcagcctcctgagtagctgggattacaggcgcgtgccaccacgcctggctgatttttgtatttttgtagagacggggtttcaccatgttggttaggctggtctcgaacttctgacctcatgatctgcccaccctggcctcccaaagtgctgggattacaggcgtgagccaccgcacccaggtgcattggttttatatctctctgtccctctgtccctcccttctctctctctctccacacacacacacacacacacacacacacacactcattttcctgtactatttgataataagtcgccgacataatgctctttatctcaagatatttcaacatctatttcctaaaaacaaggacattctcttacataaccacagtacaatcctcaagaccaggaaattaactttgatacaatattatactcttcagacaatattcacattttaccaactgtcccaatgatgctcattgtaataaaagaatatcctggatcatgcatcacatttggttcccagtgtctctagcctactttaactggaatagctcctcagtctttctttgtctttctcaacattgccgttttttaaagagtacagggcaattattttgctgaatgcccctcaatctgggtttgtctcttgtctcttcataattagattcaagtagcgcatctgtggtagaaatgacacagaaatgttctcagtgcatcctttcagggcagcagtagttgtacatgtactggggaggttaactttgatcactgggttaaggtggtgtctgccaggtctctgagcgaggatcctgctgattatatttctccctgcaagaagtcctctaatacaaagtaggcaggatggagaatgttcagcagtgatctgcaaatggtccttggaaacttagcttgtgtgacttctcactgagcactcctttacagacttacaagtctttactctgtgcctatttttctgcatttagcagtctctttatttgttggtaccaccaaaggccagcatgatgcctggtacatacttagtgcttataaatgtccaatgaatgagtgaaactgacaggctagagaagggggtaggtaaggagagctggtccaggaaaagcccagaatgacagtggatttcagagaggctctcttcctgatacagagggcccctgcacctacagatgaagaagggtggcagtttcaggtgtctggactggttctctgcaccccattcagggcagaaaggcagggtttcaggactgggagccagctgtgttattacaggtggcctgggttctgtgttgagcgagatcctaatggtccctacatttaaggcagccatttccagcattttggccattgcatcaggagaaagagaggcaaaaacaagaggggatgtcattcaaagaacagtacactgaattgtgggggtagagtggggaggaggaaagaggcaaacatctggccactgaatgactcaccaaagttaggagtgagccatctgtgtgaatcccagaggaaaggctcacaagcactcatctgctacgtactcaccctgtaatgtcgcgggaaatgcataaaagtgaaaagaactcctacgccaaagttccaggtgtggaaaagttattctgagcaaggagctagtcaacagaaaggatgtagcaattcaaattacatagaacaataagatttaacaaattgagacatggggaagcaaaaagcaaaatatcaggaccaaattttaaatggaaaagggaaactctaactagatccaaaccaaaatgataataataatgataataataataatgaagaaaagtaaacataagaaaaatatgattctaaaaggcaaagtctcatattaaaacggaaaggcaatttgctcaggaagctcacatttcctgccttctttgtttgcttggaaaacacagtagagtcgaccatctggggtaattaattctagggtaaaaatgtcagaacctgggtaaacaaagattagcaccatgataaaaataaggaagaaccaggaactaaaaaagaaaccaaattcagtaagttcaaagggatagaattctgaagaaaattctgaagattccagggacaagcttgttttgccatccgtcaactttttgaatgagagtcctgggataactcttgctcttttatatttcaaagtatctcaggtttcaaatcaatttctataaagcttccacaaaacaaatggaaggaagaactgtaaatcacaaactaaaaaaaacaaacaaaacaaaaaacctttcccccttacaattcaacaacccaaagtcaccaaattgaagaagggtaaagtaattgcagaggtaacgggctcatgcactgattgaacctaaccttggcaaaccatacttcaatggtctgttgtactaatgtccagaaagcatgcaaaataatttggaagcaagaatgtaagtctgagcttctcggttgcctcccccactgcccttccttctcagtgctaatgacattccaatgcttagtctcaaaaaaaccactggtaatagggatctcagaaatatcagaagaaaacgttccttctacccctagagctgcagacaagcagattctattccacaatataaggccaaagctagttctgaaaaagtgggtaaatagagaacattcacaaaagcattcatctctaagtctcctatcttctctccatctcggaagtggggacatgtgccctggcaggaagctcaggctggggttctagaagaggtaggaagtacaaaagtagaagaggacagtcttcatactacacagggcagaactggaagagaactttaaaacgagttggttcaattgtctgtcaccttagatgaggaagccaagttctggaaagaataagtgactctggcagtgcctagagtagccgatggcctgagtttcttcctgccaccccacacaaaacaagtgcaaccaggaaattcatgtgcctagacctgatgccttaattccaaagctgcaaaggtagttgggaccatatgatagtccaacttggatgccaggtttaagttgttatcctgtgagtgaggaaccactgcagatttctttttttcccctgaagggctgtggtgcaatcgtagctcactgcagccttgacctcctgggctcaagagatccttccacctcagccacccaagtagctgggcctacagtgtgagccaccaaacctaataccatgcctcactatgttgcccaggctggtgtcgaaccctgtggctcaagcaatcctcctgcctcagcctccaaagtgcttggattacaggcacgagccactgcacctggcccaatggagattcttgagcagggaagatggttataagcattgaccttggacttgacacttaggtttgaaccctgggctagttattactttctgagctttatttctttctttatgagaggaaaattaagtccttaatacacctatttaaactcatttcttcagcttcaactgactttgtaggatcgtaaggattacataagaaaatgaatttaaggccaggcgtggtggctcacgcctgtaatcccagcactttgggaggccaaggtgggtggtggatcacgaggtcaggagatcaagaccgaccgtcctggctaacatggtgaaaccccgtctctactaaaaatacaaaatagccgggcgtgttggcgggtgcctgtagtcccagctacttgggaggctgaggcgggagaatggcgtgaacccgggaggtggagcttgtagtgagccaagattgcgccactgcactccagcctgggcgacagaggaagattccatctcaaaaaaaaaaaagaaaatgaatttaaagctcaatactaatactgtaggtaaattagtattcagtagtgttaactattattccaagcagagctttacttctggaagattcactaggtgggttgtctccaatcaacaaaggtaacaagagcctgtcctgggggaatggagagatggtaacagatttaagacatttcagagttagcctatcagttatgtactgttgcataacaaaccacctctaaactcggtggcttgaaacaacaacattcatttattttgcacatgactctgcaatttggccagggcttgtctctgttctatacagtattgaatggacgatgaactgggggctggggagtctccttttaagatggctcactcacatggttggcaggttggttctgtctgttggctaagagctcagccagggccgagggcccagggctttggctcctctcaatgtgggcctctccacaggctgcctgggcttcttcacaacatggtgactgtgtttcaagagtaaaccattccaagagagtgaggtggcatttttataacagcctcagaagccacatattattactgttttgtactagactggtcaaggcaagaacaaatttctgccgaagttcaaggaggggtgataaaaactccatctcttgataggaaagtgcaaagttctcgaagaacatgtgttacagatatactgttgcattgacatttggaaaatataatctgctactggtagggatgacatgatttagcaaattggctaggggcagtgagggagaatgatacactgatgactctgggttgggtgacccatggtgccattaatagaactagtggaatacagaaggaagaatatgttaggggagattattgactctgagaagcccatagtagtcagaaggcaggagcctggaagaggcataagtgagtcttacacagaaaagtcacagctaaaactaagactagaagaaatggccaaggatgagaaagaaaatcataacagatttttagaaaacaattttttttttgagagggagtctcactctgttaccgaggctagagtgcagtggcacgatctcagctcactgcaacctccgcctcctagattcaagcaattcttgtgcctcagcctcctgagtagctaggattacaggcacctgccaccatgcctaatttttgtatttttagtagagatgcggtttcgccattttggccgggttggtctcaaactcctgacttcaggtgatccgtccatcttggcctccaaagtgctgggattacaggcatgagccactgcacctagcctattttctactttttaaatggcattatttttccataccagtatttatttttatgtagccagatgtattaatatttttctccaagatcacaaacatcttttttcatacatacatatatatatcatacatatatatgtcatacatatatatcatacatatatatatcatacatatatatatcatacatatatatatatatatatatatatatatatatttatttatttatttatttattttttagacagattcttgctctgttgcccaggctggagtgcagtagtgcgatcttggttcactgcaacctctgcctcccgagttcaagtgattctcctgcctcagcctcctgagtagctgggattacaggcgcctgccaccacacccagctaatttttgtatttttagtagagacagggttttgccaggttggccaggctggtctcgaactcctgacctcaggtgatccacccaccttggccttccaaagtgcttggattacaggcgtgagccaccgcacccagccccccaatatttttatcattatttttaaatgtttaatgtttaggggtcagacttcatttttgtcaaatggacagccaattgatccagccccattaactgaataatacaacccttcccactgattgaaatgccacttctatcataagttcctagagatacacaggtctgttgctggccatttttctttttcttttttctttttttctggaaacagggtctctgtcacccaggctgcagtgtggtgatacgatcatggctcactttaactttggcctcccaggttcaagtgatcctcccacttcagcctcccaagtagctgggattacaggtacatggcaccatgccccgcagtggcctttcttcagcagtgggccacagaaacgaatatgcatgtgagtggctgagggtggccacctggagagtgccacatgcactgcgtctcctcatttgctgctgtgcagaaattgtggacccactgtggccacatatgccgagttctcaagaggtgctagacatccagatttttatatgaactctccagtgtttaaagtgttggcaattaattaaaaaaaaaaaatttaaaatgccgggcaccatggctcacgtctgtaatctcagcactttgggaggccaaggtgggtggatcacctgaggtcaggagtttgaaaccaacctggccaaaatgacaaaaccccgtctctactaaaaatacaaaaattagccaggcgtggtggcgggcacctgtaatcccagctactcaggaggctgaggcagaagaatcacctgaacccgggaggtggaggttgtagtgggccgagatcacgccattgcactccagcctaggcaacaagaacgaaactctgtttagaaaaaaaaaaaattaaaaacattatgtggacaaaatacatttgcaagctgagactagcctgtggcacaccggttagtgacctctattccacatgctgaaataatgcaggccagactgggtccaggaatccacctctaactctttcccactgccaacattaagatgcaaaagaggaagagtgatgtggcagctcctggaaacccaggcatctctgggaaagcaagcagtgttatggctcatgtgtcaccttttacccacaggagttgatgatgtggttcccggtatgccaagtaactaggagggaggaggtcagcactggggaggggaaggtaacatcctcagtcaaagttggacctcccagacctgttaggcagagttacaaagaaagacaatgggttggaaggaggatggaaactgaggtgctggccaagaacatagcaagattttggccccccaaaacaagctggaaagtgatgtcacttcctatgtaataataatgtggcttccgtggaaaccttccaacttaacactgcagaatctgaaaagaaatggcaatgagcagaggtctcccaccctcacgtggaggacagggtccgcaaagatgagtcacattgtagaacttcactattcagagaaagccccttcacatgcagaatctcgctggtctctcaggacaatcctgtgaggtaggcagcaccaggggtgttactgccccttacagaagagggaactggcattagtgatgatcagaatgggtcttagatagctctgggatgtgcaggaaggacacttgtatgaagaataaaagaccggccgggcgagtggctcacgcctgtaatcccagcactttgggaggccaagacaggcggatcatgaggtcaggcattcgagaccagcctggccaacatagtgaaaccccatctctactaaaaatacaaaaaattagccgggcgtggttggcgggcgcctgtaatcccagctacttgggaggctgaggcaggagaatcgctttaacctggaaggtggaggttgcagtgagccaagattgtggccactgcactccagcccgggcgacagtgcgagactccatctcaaaaaaaaaataataaaataaaaataaaagactgcaggccctttctccttccccgtgcccatttctgtagaatcatttattcattaaattcactgaacactttccatgggctgggcactcttaggcattgggaacataggagtacacaggtcctgggcactgtcctcccctgtggctgggtcagtcatccttactctgaatcatggcccagactggccttgccctactcctctctaggtagagcagtgatctcaggccaactcttgcattttgttccagaaaccttgattatttccctgactattggtcacttcccgaaatgcactgaactgtgccaggaataggatatgtttttaagtgcttgagacacagacaagtggcagacgcatacccaaattccaaccatactttacttctgacctaattttaatatatgtttcatgcagttacacaattatctgtgcataatgctctgagaaaagggatggcacatacagtttctcctgaagcgggaaacagagcccagttggtaaggtggccagtctctagggcatcttagatgaaccttgtttcttcctattacttttccttcatctactttttttttttctgagatagagccttgctctgtcgcccaggctggagtgcagtggcatgatctcggctcactgcaacctctgcctcctaggttcaagggatcttcctacctcaggctcctgagtagccaggattacaggtgcatgccaccgtgcccggctaatactttgcatttttgtaaagacggggtttcaccatgttggccaggcgggtctcgaacccctgacctcaagtgatcggccgcctaagcctccaaagtgctgggattacaggcatgagccaccgtgcccagccttccttcatctacttattttcctgtgatgcctccatgttttagagtatgtgtctgaggggcaggaatatgtattagatatatctagggcagtcccaccagctttacattcttgagacctcatccatcagttcttgttttgcagacatatacttctattgactacaatgagaagtgtgtctcttaaaaaggtaagtctggccgcgcgtggtggctcacgcctgtaatcccagcactttgggaggcagaggcaggtggatcacgaggtcaggagatcgagaccatcctggctaacatagtgaaaccccgtctctactaaaaatacaaaaattagctgggttcgtgggggtgcgtgcctgtagtcccagctactcaggaggctgaggcaggagaatcgcttaaacctgggaggcggaggctgcagtgagcccagatcatgccactgcactccagcctgggcgacagagtgagattctgtctccaaaaaaaaaaaaaattagccaggtgtggcagtgcacgcctgtagtcccagctactggggaggctgaggcaggagaattgcttgaactggggaggcagaggctgcagtgagcccagattgtgccactgcactccagcctcagtgacagagcgagaccctgtctcaaaaaaaaaaaaaaaaaacaagtgaacaaaggtctctggttttcctaggcagaggaccctgcggccttccgcagtgtttgtgtccctgggtacttgagattagggagtggtgatgactcttaaggagcatgctgccttcaagcatctgtttaacaaagcacatcttgcaccgcccttaatccattgtttatctgctgaccttccctccactattgtcctgtgaccctgccaaatccccctctgcaagaaacacccaagaatgatcaattaaaaaaaaaaaaaaaaagttaagagcaaaaaaaaaaaaaaaaaagtcctggttgggtgtggtggcgtgtgcctgtaatcctagcactttgggaggccaatcccttgggcccaggagtttgagaccagcctgggcaatataaggagaccctatctctaaaaaaatgaaaaaaaaaataaataaataagttcaagttcaggtccctagtacctgtgaatgtcaccttacttggaaagagtattcgctgatctaattaaggtaaggatctcgagatgagatcatcctcattagagtgggccctaaatccagtgacatggatttggtgtccagtgatgtctttacaagagacaggaaagaatacacacaggtattcctgtgtatttcaagtcaagttgtatatggtagtccttgcttaataagggaaaagttcgggtctgtgtatttattcttagggctgccataaaaaattatggccttctcaggggagaaggccacatgaagatagaagcagagactggacttacactgtcacaagccaaggactgccaaggattgccgatggccactagagaaaggagaaaggcatggaatggattctcccccagagcctccagaaagaacctaccttactaacactttaatttcagactttgggcctccagaactgtgagactcaatttctgttaagtcacccatgtggtggtaattttttttttttttttttgagacagagtcttgctttgtcacccaggccggagtgcagtggcatggtctcggctcactgcaacctctgcctcctgggttcaagtgattctcctgcctcagcctcctggttagctgggattacaggcacacagctccaagcctggctaatttctatattttcagtagagacagggtttcatcatgttggccaggctagtcttgaactcctgatctcaagtgacccgcccaccttggcctaccaaagtgctgggattacgggcatgagcgctgcgcccggccaggttgtggtaattttttatggcagccctaagaataaatacacagacctgaacttttgtctttttgagcaaggactgccatgtacaacttgacctgagagtgcagccttcaatcttttcctctggggcctctggcaacagttctcagatgactatgctcagagagacacctgtgactgtccacccagcagccatctgttcaccagcagaggagaccggaagtcccttgtgaggtgctgggttctgaagcttcaggagtgggatccatgtcatcgtccatatcagatctgtctgctccaatctcagccctttcttcctgcctgatccaaaggctattttctagctgttcttcagcaatttctagctcttcttccgtttgtaaagtagccacagtttcccggggcaagtttgaggaatatagcccaaatttggctttatagccaaacattgcctcaaatggactttgctgcaaggaaacgtcgaaagcctgattcctcaccatctgcatgaatcggaggcctttggcccagtgacatgagtggttactctgcatccaggtacttatcatgttctttacatcacggcttgctccttccagggagccctggctttggccagggtggtacttaccagatacaatctttaggtctggccacaactcattgagctcatgaacaacctggtttgtgaactcaacgccactgtcagagtctaacacactgggtgtaccaagaattgtgaaaatatctaacaagacactgaccacctcatgggcctgtttggttcttaatggccgtaaaataataaacttggttgagtgatcctggtagtataaaatgaacttgaactcaccatcggcactggactgcatgtcaagtatttcaacttggcatgtggagtctatgtccttaaaagtcatgggctttggtgcaaggcctctcttgggtactgggttcttctggtggcactgtttacacagagtcagatataagacaataacttctttggtgacattcccatattttccttgcagctccttgagcatgcgtgtccgcccaccatgtccaatactgagatgtgtatcatgaagaatatcaaacaactcttccttatgtacataataccgtattcgatcacgttctccatgagtagcctctatcagtttctctgtgccctgtacagagatcacatcatattttgctgcacggcgataatcacgtgatgacttcttccctttttctttagcttctttaacttcctttattgtttgaaagtacttttctttggaaaataccttgctgttgtaacttttgctttctactaactttgttacactcataagaaacttttctctcatgttacttatctccatttccatttcacttgcatttgaaaccccaggtggatcatttccagctctctgaggcatcatggagagctgtaagaaggatcctaagaaaggaagaaaagagaacaaagttaaattcactgacactcccacctggaagactttccctctaaagttcctcatcaattctttcatctaatttttgaagatgattatatggaagaatgataatagaataatagttaaaaagcaactagaaagccaactagcaccatccaaaaccacagcatagcaacagaatttgacatcagtaaagatcacaaatatgtagaggttttagactttaggcaaacagcaaaaacaatgaagtcattagcttatagcaagaaacctaatcaactggtttttattaactgaataggagagaggataaacagaaactcctaaggcagtaggctaaaatcttaccctcagtaccctttaaaataatataaatgggagaacgttgctaaaaggtaccacataataacagcaaactcttaaactgaaatttgtaccagggattgcttctgagccttcccatgatcaacagaaacaatttcttggccaagcacagtggctcacgcctgtaatcccagcactttgggagggcgaggtgggcggatcacttgaggtcaggagttcaagaacagcctggccaacagggtgaaaccccatctctactaaaaatacaaaatttagccaggtgtagtggcaggagcctgtaatcccagctactcgggagactgaggcagggagaactgcctgaacctggaaggtggaggttgcagtgagccgagattataccactgcactccagcctgggcgacaaagcgagactgtttcaaaaaaaaaaaatttcttatggctgaggagtctgtccttatcttggggaatcgagaagaaagctgtggggatatttttaaatgacggtttccccttgacaattgtccacaagattaataaaggaagattctgagcccttaccctgtgggaccgtgttctcataactgtccagcattgtgtctctgtagcaatccttttgagagccttctaaataattccaatctttggtcatattttcaaatgctgttgcttcctgaaacaacattggctgctgccacagggaccatatagtcttggggcctgggctaaagagcagcttcagcaggactggggaagagacaagagagggcaccaggaatgaaggcatgcagcataaaggactctgaaagcgagtcaggtgaataaatggaagaaataagaaataggtctcacatctaacaagatgagtacagcttcatggatgagggaaaggagttttgctttcctgggaggtctgttggtctggccagttttgacgctgccagagctgtagcccatttattaatctttccagaataaagcagagtccaagtgaacttgggcgcaggcttgatgactcctaacaggggtggcaggatctgtttccaatggaaatattatatctgtgtacataaagatatgtcaggagattatcctgcagaaaagagataccccaaatggagtctacctgccactgtgatcagataattccttagggagagaacttgatactcagttgtctaaactgggattccttagtcagaacagccgtaagacaggatggtgatgaggccaggggagttcacatgaggactgcaggaattccagcaagcttaggaaaacaggatcccgagatcccagctgtcagatgcagagcggaggggcagggcagaatcctgagaagcagagaaagatggaaacttttaaaggctctgagcaagagtctcagttaagtggggcctgcttccaggtccggaaggtccttcactaaaagggcttcaaactcccttcctcagcattgctagttaatcatgaatattcctgattctaagacattactgattgtaaatcactaacttaataacaactttcttttgagaggaaaaacagtgtgtattaaatgaatgtattgataagacacatccaaaatttaaaatgtgaaaaatatgcattttcattctttttctttttttgtatttttttatagagatggggttttgccatgttgcaaaaaacccaggccggtctcgaactcctgggctctagtgatccacctgcctcagcctcccaaagtgaggttttgccatgctggccaggctggtcctcgaacttctagcctcaagtgatctgctcgttttggcctcccaaagtgttggaattacaggtgtgagccagcacacccagccggtcctactagttctaacagacttgaaaccacaaggtattcaatggaatccagaaaaagcaccttccagattcctttctgaaaccagcgtctctcagaacctgagtgctgtgttggttgttatttgagtcccttcaggggaccgcaaaggaaggaaaagcctcatcttcattctataaaataatgaaggcaactgggcatggtggctcatgcctgtaatcctaacactttggtaggccaaggtgagaggattgcttgaggccaggagttcaagaccaacctagtcaacatagtgagaccctgtctctaaaaataaaaaaaagaaaaaaaagaatgaaggcaacaggctagaaacaatttataatcaaaagatgtagaatctcagtctttagtagaggtacagtccttactataccatgaaattctacagtagagtccagggtctacaattatctaatagacctattttggttggtccatctagtgattttaaaaaaatttgtctccctcttcctctctccatctccgtctccacggtctccctctccctctctccctctctccgtctccgtctccgtctccgtctccacggtctccctctccctctctctccacggtctccctctgatgccaagccgaggctggactgtactgccgccatctcggctcactgcaacctccctgcctgattctcctgcctcagcctgccgagtgcctgggattgcccacaggcgccgccatgcctgactggtttttgtattttttggtggagatggggtttcgccgtgttggccgggctggtctccagctcctgaccgcgagtggtctgcctgcctcggcctcccgaggtgccgggattgcagatggagtctcgctcactcagtgctcaatgttgcccaggctggagtgcagtggcgtgatctcggctccctacaacctccacctcccagctgcctgccttggcctcccaaagtgccgagattgtagcctctgcccggctgccaccccgtctgggaagtgaggagcgtctctgcctggccgcccatcgtctgggatgtgaggagcccctgtgcccggccgcccagtctgggaagtgaggagcctcttcccggccgccatcccgtctgggaagtgaggagggtctctgcccagccgcccatcgtctgagatgtggggagcgcctctgccccgccgccccgtctgggatgtgaggatcgcctctgcccggccgtgaccccgtctgggaactgaggagtgtctctgcccgaccgccaccccgtctgggaggtgaggagcgtctctgcccagccgccccgtctgagaagtgaggagcccctccgcccggcagccgccccgtctgggaagtgaggagcatctccaccctgcagccgccccatccaggaggtggggggcagcccctgcctggccagccgccccgtccgggagggaggtggggggcagcccccgcccggccggccgccccgtctgggaagtgaggggcccctctgccgggccgccaccccgtctgggaggtgtacccaacagctcattgaggacgggccatggtgacgatggcggttgtgtcgaatagaaaagggggaaatgtggggaaaagaaagagaaatcagattgttactgtgtctgtgtagaaagaagtagacataggagactccattttgttctatactaagaaaaattcttctgccttgggatgctattaatctataaccttacccccaaccccgtgctctctgaaacatgtgctgtgtccactcagggttaaatggattaagggcagtgcaagatgtgctttgttaaacagatgcttgaaggcagcatgctcgctaagagtcatcaccactccctaatctcaagtacccagggacacaaacactgcggaaggccgcagggtcctctgcctaggaaaaccagagacccttgttcacatgtttatctgctgaccttccctccactattgtcctatgaccgtgccaaatccccctctctgagaaacacccaagaatgatcaataaatactaaaaaaaaaaaaaaaaaaaaaaaaattgaatgattcggccgggcgtgggggctcacacctgtaaccccagcactttaggaggcggaggtgggcggattacaaggtcaggagatcgagaccatcctggctaacacgaggaaaccccgtctctaccaaaaatacaaaaaattagctgggcatggtggcgagcgcctgtagtcccaggaggctgaggcaggaggatgacatgaacccgggaggtggagcttgcagtgagccgagatcgtgcctccgcactccagcctgggcgacagagccagactctgtcacaaaaaaaaaaaaaaaaaaaaaaaaaaattcaatgtttcacctatatttacagattgggagatttcacataaatctcgatttctttcttttttgagacagagttttgctctgtcatccaggctggagtgcagtggcgcgatcccggctcactgccagctccgcctcccgggttcacgccattctcctgcctcagcctcccgagtggccgggactacaggcacctgccaccaggcccagctaattttttgtatttttactagagatggggtttcaccgtgttagccaggatggtctcgatctcctgacctcgtgatccacccgcctctgcctcccaaagtgctgggattacaggcgtgagccactgcacccagcctcgatttctggctttcttgaaaaggcaacattctggctgcactggcggcattgctgcctggcaataactggctgtgatggagaggcggcatcttcctttggatcaagcttgtccaacctgtggcctgtgggctgcacgcagcccaggacgtcgggacctactaacctattcatcttacttgcccactcctgcacatttctaagctttcaatatcttttttctttcattttttttttttttgagagggtagggtctcactttgtcacccaggctagagtacagtggcatgatcacggctcccagggtcaaggcatcctcctaccgcagcctcccaagtagctgggactacaggcatgcgtcaccagacccagctaattttttcttttctttcttttttttttttttttgtagagacggggtctcattatgttgcccgaggcttcagtatcttttccaaagcaacatgaaagaaatgtgaccgtaaatcaatcagcttcttggtgtgatctatgtgacggctaggtgataaacgagttggtcagagaaaactggaaatatttccaaagccatgtttactcccttcacccacctgtgagtcttcgccttggctgtttccgactcggaatgtcctcgcattgatcctcccaatcacagccagctgaaaccagcctccttcctgacgtattcagtaactttagctgattgccatctctccttcatctcaacaacctgtaccacactcactggagcacttcgctttgcatctttagtcgaccagttcagatatatacaacctataaggtagggacggaggcttctacctgcctgtaccccctttggagggcccacgaatacagagctgagcacaaaagatgtttaaaggacattttgtcaaaaatgtcgcttacaggtaggtcgttattagcaaggtagagcagcggtacggccgagtctacgcttgggaattcatttgctgactcttatcatttactgactaaagcaaagttactgaggcctcagtttcctcatctacaacccggggagatgaccagtacccatcacaatcgattgctatgaagattcaatgataatgcagataaggcacttaatacagtgtcccctcaccgtccacaccacacgggcacgcccgcttattcctgaggaccgggctgggatgtcgcctcctttgtgtagccttcctaccctgacttcgcagactgctcccaccgcctggatccatgcccgtccacccgccagctcagggctgaacggctgaggcgggcgcgcggtggagaaaagagctgcagactgaggaaggtcaggaaggagaaagggacacaccagacgcggcgtctgaatccccctccacccagaggcccccgagcagcaactccgccccacctcccgcccgctccgccggaagccggtcagcgccagccggaagccccgccccctagaggcaccgcggacaccgtgcagcgctgttcacccagatgccagctgtgaccttggctaagccagtgacttaactcgggcccgttccccattcccacgttgttgccaagtctccagcctggaaagtaaacgggcttcaggtgtcctgtttagatgcttaaaatgaggaacggcaggagcacacacactgctgccacctcacaccttttcacttcatcctgacgaagctgcagtttagtttatattttaactcaaagacgtgttaggttttggtttgatggcactcatccagcacttgtgcagaaaacaaggtaaagggggcccatgggtctatcagataacctgaacccgagacctctcaatctggaggaacagcttgaagaagtcatctagaagctataaagtcacagaagcttcttatcctattgaaagcaagacttcctatccaatggcaatacaaacttttacgcagtaaggtaaaaaatatagcctgtccatatagcaacctatccatagtaagcaagttaaaagacaggttcaagaggaagtgtttccaactagcttttcttgtaggccttcttcttctcaatgacacccctccagcttctgatatatcctcaaatgctgctgcccactataaaaaaaatctcatcagtcctgatttcagaaaaattttagaccaacaaatcagaggtaagagactgatccactgaaaactagggagtgtcctaaatcaccacacacaaaacacaggctctttgtttcaagttttaatcaaagcttgtatataagattactttattcctgcatcttctcaatggtttcttccttgtatttgcccttttcctttcctacttggcgagatttggctttccgttcgaggatctttttgcggtctttgtccagttttagcctagtgataaccacctgcagaaaaataagaaaaaaacactcccaagctttaaataatcactaaaacacaagggaaagcccaacattcaataccatttcccaaacctggggtaggtggatgcctaataagaaaagattttaacttttaaaaaactccagaaatcactctttagccatcaaacctggcttatttactaatttcctaccaacaaaggagaaaaggcaagatggtatcagtaattcttaaagcctcttctgtgcttcattataagatttgtttctttttcactgagaaatatatgattctgctcttctcactacagttttacaagctgtcatatacaaatatatttgtttccaaagtaacttcaggctgggtgcggtggttcatgcccccaatcccagcactttgggaggcagaggcaggcggatcacctgaggtcaggagtttgagaccagtctggccaacacggtgaaaccccttctctactaaaaatacaaaaattagctgggtatggtggcacatgcctgtaatcccagctacctgggaggctgaggcaggagaatctctggaaccctgggggggcggaggctgcagtgagctgagatggtgctattattgcactccagcctgggcgatcaatcgagactccatctcaaaaaacaaacaagtaacaaaacagcagggtgtggtgaatgcctactcaggaggctactgcgggagaatcgcttgaacccaggaagcagaggttgcagtgagctgagatcgcaccattgcacttccaggctgggcgacaagagcaaaactctgtccaaaacaaaaaaaaccccacccccaaacagaaaaataataaagtaacttcagaattttaatgctagaaattaaaggtagcatccacacataattccacctgcaaaatctttagtgagaagatgacaatacgatcttactccaacagttccaatcctaaaagacatccaaattatgataaattttagtcttatgaatgcgaggaaagggtgaaaagaggtgctggaaatacagcatgcagaccaaacaaaaatctccacagtcactgaactcatattctagtatagggagcccgaaaacatttacaagtgaatctacatcactttgatagagtaagaaggcaagtgtgaggaggccgaggggctttctagagtgatcaagcaaagccctacatttgaacagagacctaaagtggtgagcaatctatctatgcacaggtatctggaagagaacagcaagttgaaaggttcaaaggcaggagattatcaagtttcatagatgtgtttctcaaacttgagtaagaatcaactggagggcttattaaaacatacacctgggtcataagccctaattttgcctcagtaggcctgggctcttagaatttataattctaccaagttgctaggaggcgagcagactagaacatatagaatggaaaaagatgtcagaagtaagggaagatcagttaaggtctttattttttttctttttttttttttgagatggcgttttcactcgttgcctaggctgaagtgcaatggtgcgatctcggctcactgcaacctccgcccaatatacataatgggacaggcatggtggctcatgcctgtaatcccagcactttaggaggctgaggcaggcaaatcacctgaggtcaggagttcaagaccagcctggccaacatggtgaaactttgtactaagaagtacaaaaattagccgggtgtagtggtgcacgcatgtagtcacagctacactcaggaggctgaggcgggagaatcgcttgcacttgggaggtggaggctgcagtgagccgagattgtgccactgcactccggcctgggtgaaagagcaagactgtctcaaaaacaaactaacagaaacataatgaccgttaacactttgatgtcagaaacattttaaatggtattagaattttcaatacaagtgcagtagtatttactttaaaatgtttttttccagcacatgtaaaatcaaggactatttctatggccttgctctgtaaacaatcatgtcaacaataattgccataatttccttctctcaagcattctcaaaaacacctaccttgctggggtgaatgcctacgtggacagttgtgccattagccttttcccgctgcacccgttcaatgtagataacatatttcttcctgtaaacctggactactttgccaatttgctgacctttatagtgtccacgtacaacctaagagcaaattcaaaagtaacaaatatttgaataaaagattaaccttgtaaatcaagtaaacaaactcatgcatacaccattcaccctatcattatattaaaaggttaaaaaaaagagcccacttcggcaacctgtaagaagttgacaacaaggaatctgttactccatctcaaaagcagcaacagaccaagagtatttaaatctgaacccattaatgtgtgcaacctagtgctagtcagagggcagcaacaaatgcttaacggaacaaaccaattctttcccaaaggttagtggacaggaatcccagtggtcctcagtttgtgaggacaagtatttctgaacagattcttcttcccagtttgtgactttcttgcattggtatgtattgaaaacagagatgacagttttcaaggtctactggcaagtttagcactactgcagcagggaccaacggctgttctcaacccacactgcttgtttgggaacccatttcatctttttgaaataggcatgaaaaaatattgatggtgtgtatgtaaatggctttagagactgcctgaattctttaatcactagctgcactacagattacacctaagggtcatttatagaaaccttcacctaaatagatgcaacaaattatttacctgtaagtgcaaacgataacgtgactgtgcttcagttacagctcctgaatctagattgggagcaattctgtttactggtcctcaactgcctcttcaatgaccaaacattgaaacctcctttccaaaaattgccaacagtgagaaaattacagcagttaaagagaactgacctaactcccatcttgcttctaacctccaagatgtccttgttcattcctgggcatagaccaaactaactttgggaggaacttagtctacaggttaactttgaaacaaagatgctaacagtgctttcctgaaacaaacccccttcttgcctgggtaccagactgcctttgtaggctaacaaattagctgcaagactagaaattacagtttaggcagctagaggcttccccaattgctcctagggataacacactgtaaagcctaagatttgtgtgatttttttttttcagaccctgcactgatggatccgctggtgccacccagatcaataaactggctcatctgatcttgtggcccccatccaggaaccaactcagagcaagaagacagcttcaactccctatgccttcatctctgatacgacctgtcaacacgccccactccctggccccctacctgccaaattatccttaaaaaaactcccatccctaaattttccgggagaatgatttgagtagttaactctggtctctcgttctggctctgcatgaattaaactctttctctattgcaattcctgtctagataaatcggctctatctggacagcaggcaaaatgagcctgttgggtagtcacaatatattgataaaaggattaatcccaaagcaatgttctgattatgtcacctaattatggtcacatcatctgacgtttgaggaaactgattttcgggcaggatccccaggagttggagaccaatctgggcagtaaagtgagacccctctctacagaaacaaaaaaaaggtcctacatgggagcatcacttgagcccacaagagccatgaccacgcaactgcactccagtctgggtaagagtgagaccccatctcagccgggcgcggtggctcacgcctgtaatcccagcactttgggaggctgaggcgggctgatcacctgacgccatgagttcgagaccaccctgcccaacatggtgaaaccccgcctctactaaaaacacaaaaattagccgagccgtggtggcgggcgcttgtaatcccagctactcgggaggctgaggcaggagaatcgcctgaacccgggaggcgaaggttgcagtgagctgagatggcaccactgcactccagcctgggggggacaagagcgagacttcatctcaaaaaaaaaaaaaaaaaagattttcaccaaataatacaattaaaaactgaaaagcagcttacttactgttttttggtccctggctcaactcatcttgccactctttgggagcaagagtctcagaagcatctttctcaggaatgcaatctctcttctaagctaagtgcgtaaaatatccatcaagacaacgagaacaagtagggatacacacctgaacttcatcatcctttcggatgggcatggatcgcacgttgtacttctgtctcagctctttggaaagaggggaagacataatcttccttcgaatgtgggaaggtgcattgaaatgccttttgcgattcttgcttcggtcggaagtcacaaagggattaaacttcattttggctaaataaaaagttaaaaagactcttaaatgaccaaaatctcatccagcttccaaacaaataaccgcaatgattttatcttgatagtctagaatgatcataggcagtgtcatgttgtgcaacttcaacaaaaactgtttgatcggaagggcctatcaaccgaagctcgaaactttttattttttgttttattcgggtgttttctgtatatgtttacggactaaagacttttgcatcaaaaacacttgtcctagttataagaccttttagttacactctcccaactcctcaagtagtgcctgaggaaatcaagactggacttacatctctgctgagcagaccgacaacgcaattctcttaactataacctcacgttttagaaggtacaatcaacgttcatcttctacaggcttaagagtgaatacgtatagccccgccaaaatgaataaggcccaccaacccgaacctggaaaagcctgcacacgtctcgggtcctaaaagcctcccagtgggcaagtgtggtctggaaattccgtgaagactttaccgagaagttacttcgagaccattctctaggaaacgacactacccagactccagtctatttccacaggctcccttccctcagctcgttttcgagttcccaaatccccggtccctccatccatctccggcccggcggcccttgatttaagaaagcaacagataaaaaaccatcccagtctctccttcctggctgctactcggccgacaagagactctcggggtccccgcggtcggaagccaccatgcccaagaacggatggctgctgattacacccgcttgcccgccgaatccttacccgctcccgcttcggtgatggccgcaaaagggaagagaactacacgctgcttccggttctgtaagtttaccaaagatctcgcgagacctatgtctctcggagcgagaggggcgcggagtttgagcgaggggagtaaactgggaaataaatttatggctagtgtcacctagtggctaggaggggaactgcgagggattgcaaaactcccctcctccaggtcctagtgtctcccttccgagacccgggtgctgccgctgaatcctctgggaagggtagtcccggggctattggctaaggctgctcagggtccaactgcccctgggggtgatgaaggaacgagcggccccaggagaccgcccaggagacccgctggtaccttcactcccaggtgccggggcgggggccggcaccccttagccggggaagcgcaggccctgcttctggccgccaggaggcgcggggacgccggccggccggtcgcctgggtccctgcactcaccgtcccctcccgcccgtggcgtgggcgcggccagcgtgccggtactttaacgagctccaccgcgacgccggccaccgcccctgcacctgggcgtctgctgaccgcacagcagggcccgccagagattcagttctgggtggtgaggggccttgcgaggaccagggccaccgatcgccgcctgcccccgcggaaataggtccaaggccgcgtttccaaggcgcccccagtgctgtgggaggtgctggtccagaccacgcttcgaaggagccaggcgagaggaagcctctcggtgcggggagctgcgcgggtttctaaatgctcggcctgtttgcgtccagttcaggaccagacggaagccgtgcgctccctgcaaatggtttcttttcttcttcttcgtgtgtgtgtgtgtgtgtgtgtgtgtgtgtgtgtgtgtgtgtgtgtgtgtgtgtgtgtgtgtgtgtctttttcttctttttgagacagtttcgctcttgttgctcaggctggagcgcactggcacgatctccactcactgcaacctccgcctcccgggttctcctgcctcagcctcctgagtagctgggattacaggcgcccgccaccacgcccggctaatttttgtagttttagtagagacgagggttcaccatgttggccaggctggtctcgaactcccgacctcaggcaatccgcccgcctcagcctcccaaagtgctgggattacaggcgtgagccaccgcgcccggcccctgcaaatggtttctgaggcagcggcagtgcagcaggcaccggcgctgaacggcttctgctgaatgaatgacacgggtgtcacagtgacagaggacaggcgtttcacaagaataccgaagacgtagtgagccttctgagtgtggggacgctcttctctacactttacatcatgaattcttttaatccacaaaatggctctgttgttgctggtattattgtccccattttacagattgggcaactcagccacagagaaatgagaggaacttggtgcaaggttatacaggacccataagtcacagcagaacccgtgcaggctggctccccggcctcttctgggaactgtatatggccccaatttgtgggaacctcatagtcaggactgcccagaggatggtcagcaacgaacatgcgttttcatgatttaaaaatagttgtgttcttaaatatgctgtgaaggaagtagccctagattttattcatcactgaaaaattcagcaagaattcctctgctgcgactcttttcaacaaatatttatgaggcttctttcctgggccagccctgaaactagacactggcgatgcaaaataggtcaaagtttgtgccttcaggaagtttactgtctacaagaaaagatagacaagggaatcaacagccacgagaccacaggaaaagtgctcgctgagccagctgcccttgctgtctctgtgattcaggagcagaagggagctctggggtcagggaagacttctgaggtgaggtcagcattgactggaattggaagaatgttagcattcgctccacaaggcagtaggaattgcttgaaggaaggcttggaggtgtgaagcagcgtgactcgtgttttccaggaaccaggtccttgccgctgaagagaggcatttagacgggagcccaggggctctagggctgagctgagtgtgatttgggtctggaagtcctagggagctgccgaaggtgcctgccttccttccttgccttgcctttctggccttcacgttgtcactccttctctttcttcctactgtccttactagtttcccaactcccttcctgttcgggtgtccccatcgtcttcctgtcttcccaccaaggccctctctgtttcctcagccctcacatcctctgctgacaccctaccctcccaggccttcctttctttctccctctgttcaataccgagtctcaaaatgaaaccttcaggccgggcatggtggctcacgcctgtaatcctagcactttgggaggccgaggcaggcagacttgaggtcagaagttaaggccagaagtttaagaccagcctggccagcatggcgaaaccccatctctactaaaaaaaaaaaaaattagccgggcgtggcggtgtgcacctgtaatcccagctactcgggaggctgaggcaggagaatcgcatgaacttgggaggcggagcttgcagtgagtggagatcatgccactgcacttcagcctgggagacagagcaagactctgtctcaaaaaaaaaaaaaattaaaccttcagcccaccatccatacagcatgacacttgatacaatgtgaaaatttgcagggtacaaattgtccatacagatgcaaatggccagtagcctagttagaacgtccctatctgtttttttttgttttttgttttttttttgaggcggagtctcgctctgtcacccaggctggagtacagtggcgcaatatctgctcactgcaacctctgcctcctgggttcaagcaattctcctgcctcagccttctgagtagctgagattacaggcatgagccactactcccggctggctaatttttttatttttggtagagatggggtttcaccacattggccaggatggtctcgaactccagacctcaagtgatctgcctgcctcggcctcccaaagtgccgggattacaggcgtgagctaccacgcctggccgtccctttctctcttttttttttttttgagacggagtctggctctgtcacccaggctggagtgcagtggcgctatctcggctcactgcaagctctgcctcccgggttcacgccattctcctgcctcagcctcccgagtagctgggaccacaggctcccgccaccatgcccggctaatttctttttgtatttttagtagagacggggtttcaccgtgttagccaggatggtctcgatctcctgacctcgtgatccgcccgccttggcgtcccaaagtgctgggattacaggcgtgagccaccgtgcccggccccctttctcttaacgtgtctgttgggtgtcttgccttcaccctgcagcctagtctgactgcactctctctccctcgctgcccacattcctcttcctggatttgaaaaaggtccctttaggatcattttgaagccttcagacatagcaaagcagggattatagctagattccacacccagagttgattagacttaacttttttctaaacaccaagctgtcaggtttattcattcattcactcattctccaaatatttctccagctcttactgtttactaaattctgtgtcaggcactggagataccaagatctataagatctagcctccccggaaggagcacttcgttaaggaggagacagatgtgaccagataagcataatcaagtgtcaccgatggatgctttgtgggggatgggggggcggcgtaggagctggcagttcccttgagcaaggaagtgggcacgtcttcagaggtaaccctggaactatactgtttctgaaaagctaggtaggagttttccaggtagatggggtggagtgggggttggggtgggggggtgtgtttcaggcggagtgaggctcataagcaaaggcccaggcctgcaccccactgcatattgggaactgcaagtggtttgtgctgagaatgagctgtggagttaatttatcccggtaggaggaggagttgtaagggtgaggcaaagttgtttattgtgtgtccctgaaaaaggacttttttttttttgagatggagtctcactctgttgcccaggttgaagtgtagtggcacaatcttggctcattgtaacctccacctcccgggttcaagcgatcctcctgcctctgtctcctgagtagctgggattacaggtgcacgccatcatgcctggctaatttttgtatttttagtagagacagggtttcaccatgttggccaggctagtctcgaactcctgacctcgtgatccgcttgcctcggcctcccaaagtgctgggattacaggcatgagccactgcacctggacccaaaaaggacatttatactgacaaggaggtcaaaaggagatagcagctgagtggtcttgtgagtcacacagggttcagtgaggggagaggttatggaactgtttctgaggggcacagaggtctctaatatgcctgtccaggatcctggcaaccctcgtcagggccctgctggcaatgctatggatccttaagcttgactggtaggctcagactgtgtaagtgtgtattactgttaaaggttattatgatgggaagtggctgtgtgtgtgtgtgtgtgtgtgtgtgtgttgcaggggttggggtgcctctggacaaggggaggaagagaaaagcaactaagtttaaccctaggcatccatccctctatctatctatctatctatctatctatctatctatctatctactatctatgtatctatctatctatctatgtatctatctatctgtctatctgtctatctctgtctgtgtaatggtattgtcctgtagtgccctcactgcatgatggttgcttaaaacaaaagattttatttgaaaacaaagaggaaaagaagagaagggggaatcaaaataagcacattcaatgacggggcccagagaaatgctcaggaactcaggaacactgagaacattaaatttttaaaccttactccttgggcgcctgttagcataagatgtcacacctccaaccagacaaaccagccccactaaaccagtagttgacactctcgaaccacaggacaggtggtttggcagctcttgactgttcttggggcaatcttacttggcaacaggcgtgtacactgaagatatctttagcttctaataatttttcaattcagtttttgaatgttaaatttacttggttcaaacatcaaaagggataaatttaaggtaaagtgaggccgggcgcagtggctcacgcctgtaatcccagcactttgggaggtcaaggtgggtggatcaaaaggtcaggagatcaagaccatcctggctaacacggtgagatcctgtctctactaaaaatacaaaaaaattagctgggcctggtggcgggtgcctgtagtcccggccactcggcaggctgaggcaggagaatggcgtgaaccctgaaggcggagtttgcagtgagccgagatagcgccactgcactccagcctgggcgacagagcaagactccgtctcaaaaaaaaaaaaaggtaaagtgaaaactccccttcccattccatcattttctcattcctttccatggctagtcagaattattagtgttttgtacatcttcccaacttccttccttccttccttccttccttccttccttccttccttccttccttccttcctccctccctccctccctccctcccttctgcccttcttgtctttcttttctttctgtcatcaaggtcttactctgttgctcaggctggagtacactggtgcaatcatagctcactgcagcctcctgggctcaagggaccctcccacctcaaccccctgagtagctggggctacagaggtgcgccaccacaaggtaattacaattttttttaaaaaatagagatagggtctcactatgttgcccaggctggtcttgaactcctggcctcaagtgatcctcccaccttggcctcccaaagtgctgggcatgaaccaccgtgccctgcattcccacttttttgatgcataagtaagcaaataggaatgtaaattcttattcccccccctttctttctttttctttttttttgagacagagtcttgctctgtcgcccaggctggagtgcaacggtgcgatctcagctcactgcaacttccgcctcctgggttcaagcaattctcctgcctcagcctccctattagctgggattacgggcacgtaccaccaagcccgactaatttttgtatttttagtagagacagggtttcaccatgttggccaggctggtcttgaactcctgacctcaggtgatccgcccgcctcggcctcccaaagtgctgggattacaggcgtgagacattgtgcctggcctatttcctgctctttctatacaaattgtagtatccagtatccggtgttccacaccttgcttttcctcattttccattgtaccttggagacattccatataagtttattgagtcctttcttgttctttttttttttttcttttacagctgcatgatattccctggaccttaagatagataaccagtaccctattgattagcatttagggtttttccaatcctttatttttataaacaatgctgcaattatatagcatcacatgtatgctgctgcccatacatgcaagtatatctgtaggatgtttctagaacaggaattgctggagcaaagcagaaattttggtagataatgtcacattgcccttgatagggattttaataatacacattcccactaaccattcctctgcctccctcagcttcagtagcggagtgggttatgaggcttccaggtttcgacaagctcataggtgaaaaatggcatgccagccaaattttaattttaatttcttttgcaactgtggttgaatagatgtgtaagagccatttctgtttgcatttcaaactttttcttttcctttctttcttttctttctttcttttttttttgagacagagtctcgctgtgtcacccagctggagtgcagtggcatgatctcggctcactgcaacatccacctcccaggttcaagcgattctcctgcctcagcctcccgagtagctgggattacaggcgtgcgccaccatgcccggctaattttttgtatttttagtagagatggggtttcaccatactggccaggctggtctcgaactcctgacctcgtgatccacctgcctcggcctcccaaagtgctgggattacaggagtgagacaccgcatcaaactttttcacctaaagtgaattgtccttcaagtccaggctcggagcttcccacataaattgcagagtctctggaatctttgagaaaatatatacctttattttaaaaatagcttttggcattctctgacaataaaaggagttgcagctacaggtcaccattgaacatacaaaaacactgagagtatgttgaaagaaacttttggcaaatacgacagaatctgaaaagactagaaccaggttcccagaaattcatgacactgtttaaaacagcctggctgaggttaaaagagactcattggagtctttgcaaatttaacattatttttattcctataataaatattttccccatggaatccatctgtatccctcccctccaatagcacctgtgctcttctgtaatttttttttttttttagacagagtctcgctctgtcacccaggctggagtgcagtggcgcgatctcggctcactgcaacctccgcctcccgggttcaagcgaatcttctgtctctcccaggtagctgggattacaggcacgtgccaccactcctggctaatttttgtatttttagtagagacgcggtttcaccatattggccaggctggtctcgaactcctgaccttgtgatccacccacctcggcctcccaaagtgctgggattacagacatgagccaccgtgcctggccacttctgtaatcttgaaatgagcacagagaagcccacaagtgcttttaaagcagccctctctatgtcccaaatatcccctgtagtggggcccaattccccagcggtccccaaatgaccagcactgcaggcatttaggaactagataaaacgtagactgctatttcttccctccccaccaagacagcaaattgcccagaggggtataggttgagggaggttgggggctcagctgtgggcacagctgggtgcagaccaccacttagttgagataattgctggaggtttttgttgttttccattgaaaggtgttggttgacttacggacctcaataaacagccaatagctatccccgaatgactcaggctagacccaacctgaggctcttcacagtccaacgtgggggccccaggcaaagagaccttgaggagcagctgagggcacctgggcctcagcatttctcggttgagatggcggcgtccctgacaagcacagctgttttcctccccacccttcctcacccagcccagcctggcaatccacctaggaaactggcccagctggtgtggcctctaaatgagtggctgggtcatgaggaggaggactagctgggagggaggcgggagcccccaggggttcgtttgcccacatagttctcagctgactcaaggctcgcctgtcaggcttcccctccactccctgccacccttgagaaccccaggactcaaagtttggatccctcctttggcctggagggctcagggagacctctggctccgttcgtggggcactctgctggggtggcctctatcaaccaacccctgtctctggatctggcctcagctctgcaggaagaacagtttctgttcattctcccagaaattctggggcagcctctgagatcagcttctccttcagggaagcccttctaagctggcaggttggggacagggagggttaggggatggggtgctgtggtggaggtcgggggtgagtgctgagattctgggcgccccttctgtctgttcccgagggcaagccgcaaatcctgggtgggaattctggcctggaggatcctgccatcggccagcccagcaggacgtctgcctgcaggactttcttgtccctggaggggcccacctggctttgggcaggtcacctggcaggtaaggtctgccgctcagggctggtgagcctgcaggagggcagtgaccacccatcttcccagcctagaggaaggggaacgcatctgctgaggattcacgtggggaacacgcgccgcgcgcatggagtcagctccagcctctctgtcgagcggaagcccctgcgggggtcggggaagcccaaggccctctctgtgcccaggtcctcccctctgcctgcccgcgtgcccctcggagcttggtggcaccagggctgccgtgggcctcctgtcccaccccaggccacggctagcccggcggcctccctgaggtgcggctcacgcctgcttcctcaccagcagcacccagggcaggatggcggccaccacggccaccacagcgatgagcgtgatgagcagcagggcccgcgatcggcagcagaaggcgcgggcggagcggggcgccagggaggcctccgagagctctgccaggctgcggcggggcagcacgctgtcctgctcccccaggggcatcccgtggcggctgatgacaaagatctgtgactcccggggcaggctgggcagcaggtccagggggagctgggcgctctggcccgggctgcctggcggcctggcctggcctggaggtggcctccaggcaggggaggaggcggccagggggtttgtgtggcccaggctgtccagtgggggcacggagggcaggcccacgggcacagccagcgtctgggagctcttgtccagcatggagggccagcgggagctcttcttgctgaggaatgtgacgtagcggcagatggggcagaccagggtcctctggacctgcccatccacgcgggtggacagcaggtacttgaccaggcagtcatggcagaacacatggccacagctcagcgtccggctggcgccctccaggtcccggaacttctcatagcacacggggcactcactgcccgagctgtccttgctctccccttctgacatggccactgggagatggcacgctcagctgtggacgggaagggttgtgaatattggggcatttcctctttccctcccccgtcctaactcccacctacacctctgcctccactgccccttatcccctctccctgtcttctgcctcctctctcttcctcctactcttggctcttctgctgctcctcctctatggcccacctgactcaaacctagaacccagacccttaggaggagaggagcagatgcttctggaagggagaatcgggagacagagaaccagagaacccagtcacactggaccccaggaggaggtgtgtggagttcctgatgtctcacctcaatcatcatgtacacacatggtgaggtcactgcctcacctcttcctgcttcagtgacggaagtgaagaaaggaagtccctgttaccaggggaagcaggtggctaagaagatgcatgcacagccccagtccagtctccaatttggacctgcacccagagtggccattttccagaaaagcccgtgctagtctcaacctctgccctcacctggggttggcgggtccattggatttcctccagccattggattgcattcctctgtgctaagtgtggctataaagcaatgactgtttaaaaaaacaaagcttagaacttacacattcaaatgcctgctggccctccacatagtcacgtcagggagctttaggttcattccctcacctgccacagctcagtcattctccaaattcttcttatggggctgcctgaggcagtgagagaagcatctgattaaccgtgatggagacagaatttcatcctttgagaatatgtctgatactttggaaatgcccagaagtcactggtagccaagtctgataggaaagtaaatgagtgatcaagtggcatgatattgtttgaaatcaaagctatggagtagcaagatataaagtaacaagatatataaagtaacaagatggtttgtttttttttttttttttgagagggagttttgctctgtcgcccagtcaggagtgcagtggcgcaacctcagctcactgcaacttccacctcctgggttcaagagattctcctgtctcagcctcccaaatagctggcattacaggtgcatgccaccacccatggctaatttttgtaattttagtagagacagagtttcaccatgttggccaggctggtcttgaactcctgacctccggtgatccgcccgcctcggctggcctcccaaagtgctgggattacagacgcaagccaaggcgctggccacaagatgggttttaaacagaatctgagagcagatttgtttgattaactacatggcttcccaagtcgatggctttgaagggaaacatccactggggtgtgtggtgaggtccaagtgtccgcactgaaaagttcccagtgtcacaactgtgtagcctaaacttatctggaacagcttctttaaaaagaaccatgattccttgttattgctgctttcttccatccatgacagagacaaaagacccctggacacactgataaaatagagttgcatggcagcccccagacctgagagatgacatagtgggaacaaaatcaatgtgtaggaaggacaactgttaagatcacaaatctttcagaatccctccctctcttggcttggctccaaatctattttgccgagttgaaaatgtcccatagtcaaagagcaaaaatatttggaggtgggataaggaatctgggatcctggaggaggcccccaaacctctttgggagtttctagctttggtctttgagatggtcaatgtggcccccaggatgggggatgggggttcaaatctttgatctacccattactgtctgtataagcttagccaagttgtttaacctctctgagtctcagtttcctgtccataagatgaaattgataataatggtatcatcttcctcggagagttgttgggggaattaagtgagctaatgtgagtgaagagtctggctcagagtaagtgctcagtaaatggcagttgtcattattaagacagaccatgtcctgtcccctcttctcccaaaggggacttggagacccctgtcacagctcttgaggcagccacagcatttgccttcctttccttccctctcatccccaaatgttccttagtatgtggatgattaaaaaatcgcacccacttgacagagggcagctcacctcaaattagaataacggaacaagatgacaatggataagataagtgatgggcaatggataataatttaaatggttattccaatctttcttggtagttatttcataacacatttgcaaatgtttataccaaacagccattataatcaggatgggcatgattttcttaagccaatcaactattaatatgtttccctgcatttcataactccccagagtgtatgatggcaagagttccatccttctatccatccatccatctgtctaattattcgacacatatttattgagcacctgctatgtgctaggtactgacttacatattggggataagtagtggccaaggaagttcttataaaactttagagcctagtggacatttataagttttcttgaaaaagatatttttttgaaaggagtattgatgatcaatggtttaagttgtttggataactgagaagtagagaccaaggctgacaagaagagcaaataaggaatactagagggaaaaaggactttagagatcacttagttgaagctcctagtttcagagatgagcagatccatgtctagagagagggaagtgagtcacctgaggtgaccggtgaaggtgacggagagggagttaaccgagacagagaagattccgtagatggtagaacattgttagaatcagctgatagattgggtgagtaggtattagccaagttagaaagcaccgtcctccttgagacgagcagggaaggagaaggagagcctctacttttcatccgagttagaggaaaagtaaaaaggacccagggagtgcagaagacatccgaggccccaatgatggcctctctgggcaatccttctcccttccaacaatggcctctctgggcaatccttccctcttacaacgatggcctctccggacaatccttcccccttccaatgatggcctctctggacagtccttcccgcttccaacgatggcctctctgggcaatccttcccccgtcccgtgcttccggagagccacgccgtcaacacctggacgatgctacctccttccccaccttcttgcctccctttctcagtctttccctgacccctccctctgcctctctcgctttctgaatcccattccattccccatccttgagttcctcttatggtatgattctgtttggatgctggggtgagggagagggcaacagaagaaatgcaaggaacatactctagtttgagcacaaacgagttgaagaagaatgcagtaagtgccaaagcatccctgttggtgccttaggaaactgaggggagaggagggctggaaagtattcctaggtgaagtgggaccagtattgagctaataataaataattattattatttacaacagcgaccatttattgaatcctaattatatgcttggcattttgcatcccttcctcttctgatcctgacaacaaggctggggcgtagggattatcttcattttacagataagggacctgaggctcagagcttaagactttgtcttcagactttggtcaaaggaatagaagaaatagcactgttagaaaagtgactacccaaagttccttcctctttaggtttagagtgaccctaaacaaggatgcccctctggccacctgggaggcagggggaaggcaatggctggcccaagggagctgaccttgggaagccccagtactgagcctcccccacagcagtagcccatctccggaacagagtgtgggggcaggtgtccccaccccagagaaaacaccccccatccccacctcagcacaggagccagtgggacagaatgatacttccaggcacctgggattccctcctggagccccagtgcaaggtcctatagctttagctgtgactagttgctcacccacaggtatctctttctctctctctctcaatttctctctctctcattctcctgcatccttccaatgttggcaaccttccaacattgccaagctccttccccacgcccatccaggcccctagactcactttagctgggaccggagagagcagcatccaccttccctcctggggcctccagcagatctgagccaccccgaggtgctgagcagcagcacgatctcctcctgttgctgttagtgtgaccgccaccgccgaggcaattcctaatgacagagcaggtcgggaggacagcgcgaggaagtgaatgtcgcccaacccgtttgaggccaggaggctttggcgttgcccagggggttggcagctgctggagtcaggtgatcttgctgaggatgccaggagaggaacccccagcttgaggaggagcccaggggtgggtgctcaggagagtcagagggtctcacagtggaggcagtgacccaggacccctttgactgaggctccccaggcatgggtctccctatcaataggaaagtcacccacactgtccttcccaccctcctggacccatttctgtgatccccatcttccccccacacccctatcctcacaccatgcacagggtgaaggggtcagtagtagatcagcctcgggaagtctatgacactcagagtcatatatttgtgggatctgcctgtgtgcatttgtcattcatggaacacccaaaggcgcttagaactccaaagacccagcaccactggcataaagaacgaggcgagtaagaccagtgaagcaggaatgcacacagatatggaaagaagtccccggcatcatgataaatggaagcaactttcagaacagcctgtgtaatacaattctatttatgaagataataatacatgatcatattcatagaggaaaagctggaagaaaacacatcagactgttaatagcagttatctctggagagactttctaagttttatatttctgtgatgtttgcattttcaccctgaatgtatgtttcttttgtgattagagaaaaagtcatccactgggtatggtggctcatgcctgtaatctcagcactttgggaggttgaggcgggcagactgcttgaggccaggagttcgagaccagccttgccaacatggtgaaaccctgttgctactaaaaatacaaaaattagctgggcaaggtggtgcaagcctgtagtctcagctactcgggaggctgaggcacaagaattgcttgaatccagaaggtggaggttgcagtgagtgagccaagattgcaccactgcactccagcctggatgacagagtgagactgtctcaaagaaaaagaaaaagtcatcaagaataatggaggaatgaagttcggggaactggaaatcattttggaggattccctcccagtcctctcaggaggtccccaagaaaccagttttcttctgaaaaagtaagttactgggtccaaggcacagcccagcatgtgtgtgaccccataggatgacacaggatgacccctcttctgtccgatcagtcatggccctggcttaatggacaccttgaagctggtggggaggacagtcaggccagtgcactcggccacttcaccatggacagagatccgtgagtgcaagccgtcgtcacagtctctcttgttctttccctgggagttccaggtggtcctagattagcaaatgaaaatgcagtatgcccaggtaaattagaatttcagacaaacaacgaatgctttttggtataaatatgtccagtacaatacagtacaatatctgggatttttttttttctgagacagagtctcgatctgtcacccaggctggagtgcagtggccacaagctcggctcactgcaacctccacttcctgggttcaagcgattctcctgcctcagcctctcaagtagctggggttataggtgtgcaccaccacaccccagtaatttttttgtatttttagtagagatggggtttcgccatgttggcaaggctggttttgaactcctgactttaggtgatctgcccaccttggcctcccaaagtgctgggattacaggcgtgagccactgtggcggccctctgggacatatttatactaaagagtattccttttctatctgagactcaaatttaagtgggcattctgtattttcatccagcaagtctaatcccagagggctctccaaatttctctccttccactggcatctccaaggggcgcattgcaaagttctaagccccttcaacaatgtggctcatgactctgcctagggctttctggggattcctgaaaaggtgccccaaatacctcagtatcaagcccttgtgtgtcccccagagaggagacggagccaggcccggccatccttagacttttgtgatgtgatttatggggtgatataaagttcctaaggcaccaatatcttttccactggccctgtcatgaagcttgactatgaaaattacctttaatatgtaaatatttattatcattgtctgtcttggtttgtgttctaaaaaaagaattctggcctggcacagtggctcaagcctgtaatcccagcactttgggaggctgaggcaggtggataatgaagtcaggagatcaagaccatcctggctaacacggtgaaaccccatctctactaaaaatagaaaaaattagccgagcacggtggcatgtgcctgtagtcccagctactcgggagactgaggcaggagaatcgcttgaactcgggaggtggaggttgcagtgagctgagatggcgccactgcactccagcctcggcgacagagtaaaactctgtctcaaaaaaaaaaaaaaaaaaaaaaaaaagaaaagaaaaagaaaaagaattccacttaaaaaattgtgtatacttatatatgttggcacggacacacacatttacctgaggaggtaaatgcatcagccagagacactttaacttgaatttatttttcaggtcagctctagccatctagcaagtttctgggaaagtggactgttggattttggcaggaagaaggaattagttatcagcaaaggttgagagcacaagtatactagccaggaggaactacactataggacttgatggtagggagctctgggaaattagaccagtgcatgagcattcacgagtgctctatgtgtgtttatgtgtgttggtgactaaagagaaaatgccatgtgcctttgggtaggttacttaatccttccgtgcctcagttgcttcatctgtagaaactgcgcctcagttgcttcatctgtagaaaatggggataatagtacctactctatagggttgttgtgacaataaaatgaatgaatgcaagtaatgtgcctggaacaacacctgctacacaggaggggctctgtcagtgttttctatctatatgtctgtctatctgtctatcagtcaatcaattcatctgtctatctggtttctccattgatccacctatctcaattgatctatgtatctattgatctatctaatctctctctctctatcctctccatctatccatcaatcaacctatccattgatccatccgtccatctgtccatctatccatctctctatctaatctctatctctccattgatccatccatgtaatctctccatcaatcaatcatctatctttcaatcaatctatctctccattgatctatctacctaatctctccactgatccatctctgtgtatctatgtatctacctatctatctctccattagtctatcaattaatccatccatccatccatccatccatccatccatccatccatctatccatctaatctctctctccaatctctccatagatctatctatctatctatctatctatctatctatctatctatctatcatctatccaatctcttcgtctatctaatatatatataaatatatttcttcatttatctctctgtatcgattatcatcgaaatcatccttattattattatggcaagaagagaaggctaaaggtgggtaaggagatgcaaacactttctgactcaagggtcctgggcaatcttgtcctgatttagtgaataaggtgtctgttgcaaatactgccatgtcattttggagtgttctccccttctcagcagaaaggacaaatgcacgctgaaccatggaagaatggttccagctcagggacggacgagaccaggggtcccttccctgggcaggtcatgctgtagagttttgtctagttctggggccacattggaagtggtgttgatgaggcaccaaagcgtgtcctggggaagagcttggccaggatggagaagagtctggagaccattttggcccagtgacataagatcttccttagagagacatttttgtgaggctaaggggcttttagacaagggaagaatcccacccccgctgaccactgactaactgcaggtgtggtttctgcaaggggtgagtagctggaccaggacagaagttcctaatgccagaatcacctggagaacagattacagaaactgatttccaggccccactcatgacttgccggtcttgggagaggcccaagaaagtacactgtacttatttttaataattggatagatggatggatagatatatgataatgtaagaatagtgcatgctaatggtggaatctaggtggtggatgtatggattcttgtaaaattctttcatctttgctctatgtttggaaattttcataacacatgttggaaaaacaaagtgccttcttgaataagtaatatattcagatgattcaaaagttagaaagtggccaggtgcggtggctgatgcctgtaatcccagcactttgggaggccgaggtgggtggatcacctgaggtcaggagttcgagaccaccctggccaaaatggtgaaaccccgtctctactaaaaattcaaaaaattagctaggtgcctgtaatcccggctacttgggaggctgaggcaggagaattgcatgaacccgggaggcagaggttgcagtgagcccagatgacaccactgcactccagcctgggcaacggagcaagatttgtctcaaaaaaaaaaaaaaaagtgagaaagtgttaaatgacctgcagtgaatattaatctccctccctgtccctcatctgcccatttcctgtgcatcccttcagaaggtaacgatcccttcaaaaggataaacaaaaacaagaccaaaacaaaaacaaaaacaaaaaacaaaaaacaaaacaaaacaagaaaaccacaccagaaaataacaggagttggtgaggatatgaagaaatgggaacccttctaccctgctggtgggaatgtaaaatactgtaccttctttggaaaacagtacggtggttcaaaaacttaaatatagaattactgtatgatccatcaattccgcttctggatatataccccaaataatttaagcacggactcaagtagatctttgtatacccatgttcatagcagtgttagtcacaatagctaaaaggtggaatcaacccaaatgtccatcaacacataagtggataaacacaatgtgatccatccacacaacggaatatttattcagccttaaaaggaaggaaattttaccacctgctacaacatggatgaaccttgaggacgttaagtgaaataagccagatacaaaaggacaaatactgtatgattgatttcacttatatgaggttcctagagcagtcaaaatcgtagagacagaatgtggaatggtggtttccaggggccggttgggggatgaggggacaatggggagtgagtgtttaacagggacagagtttccgtttgggaagatgagcgctctggatggatggtggtgatggttgctcacaatatgagcgtacttaatactgtggaactgtacacttaaaatggttaagatgggccaggtgtggtgactcacgcctgtaatcccagcactttgggaggccaaggtgggtggatcatttgaggtcaggagttcaagaccagtctggccaacatggtgaaacccgatgtctactaaaaatacaaaaattagccgggtatggcagtgcgcatctgtaatcctagctacctggggggctgaggcgggagaattgcttgaacctgggaggcagaggttgcagtgagctgagatcacacctctgcactccagtctgggcgacagagcaagattcgtctcaaaaaaaaaaaaaaaaaaaaggttaagatggtaaattttgttatatgtattttaccacaataaaaaaggtaactgctgttattagcagttagttttgtgcatattatttatatttatatgtacacaaacaaatacaaatagggatttgtattccctgtttttttttttcctttgagagatagggtctcactctgtcgcccaggctggagtgcagtgttacaatcgcagctcactgcaatctcgactttccatgctcaagtgatcctcccacctcagcctcctgagtagctgggaccacaggcacgccaccacacctggataattttttaattttctgtagatacaaggtgtcgttgtgttgcccaggctggtcttgacctcctgggctcaagaaatcctcccgcctcagcctcccaaaatactatgattatagacatgagtcaatatgcccctccttccccccgtgttttttttttttttttgttgttgttgttttgtttttgagatgaagtctcattctgttgcccaggctggagtgcagtggcgtggtcccagctcaccgcaacctctgcctcccgggttcaagcaattctcctgcctcagcttcccaagtagctgggattacaggtgcccgccatcacgcctggctcatttttgtagttttagtagagacagggtttcaccaggttggtcaggctggtctcgaactcctgaccttaagtgacccacctgccttggcctcccaaagtgctgggattacaggattacaggtggctgttagccaccgtacccagcccttccccgtttttaatctaaaggtgtgcaccacacgcatgctggtgcatcttgcttgttttactggacagcacagcttggagctttctcccttaggtgcatatacagttgttgaatctgagttttcagtagcttccccaggtgatgttaaggagcagcctgtgtgggaacctctgcccccagagatcactggggtcctgggtagcttggagaggtattccttcctccaggctaggggaggaggactggaagttgaggtggctcagctcagatggaggcccaaagggcccccaggagcctctagagtaacctgctctctgtccccaccatcttcactgtccccagctttccctgcacagcatctccagggaagtgggatccatgaagctcctgactttcctgctcccccggagggacactgggtgtccaggcgcaggggcattccgcagctctctgcactaccttcctgccactccctgtggggacagagtggatacagcaggcaggggcaaccctgatgggatggggtcactcatgccatttggaaccttatgccagggctgacattttaataagagtaagtgtgagtcaccctgaatatctaaggcagaggggttggaggctggggagcaaacatggggccaggaactgcaggcccgacccagaagcagtggagagaagagaggtggggaaggggatgggatagagtgagaatgcgagtttacagttaaggccaacctttggcagggcagagactcttggtctgtttacatcactgccgtccatgaaaagacacctggcaatgatctttgccatgctgttgtgggcaggcctagattaccgaccagggcccggataggggacactgaaggttgtgtgctgtttgaagacagccctgttgccctgagtgcacatagttggccaggtggggccagctccagtcctggctccagatgaggatgggctcatgcaagggaggcagggcgaggcaagctggctgccctacgtgtgctcagcatgaagacagtgaggcggtgcacaagggcaggaggtgggggcacctcccagccatgagtgtgtgtgtgcacatgacccttgaccctcctcccaccgcgcctccacttctcagcatcctgcttgatctggtgactgtgggcagatgggaaggcctcaccagagagggcaaaggaccccacaagtatggagtaaagtatggccgtgtccctagggaagcctacacagaggccaggggacgagatctgctgcttcagtggccccacaggatgccgctggggcgtcccgggtgaggctgcagtctccacagtgagaccaggggattaccctgggttggtgcagccctgagggtctccccacccatttgcagctgtcggctctggcctggcttgctccagccagctcaagtgtttgctttgccccaagcttccctgttgtttcaccctcctgggctctgccccattattacatagcccaggactgctggtagaaccggggacaccttggacctctgaacagaacacatagaggcgcctccctctaggaagttaattggaaaaaggccctctttcttctctggctgtgtcagggcacatggcttggcaggcagaataggaactgattttcgttcccaattcacctgctttggttcccaagctccccagcccaacaatatgcagtggccacaggtctcaccccatcccatcccctccctctgaagacttcctcggctccccattgccctgaggcacagcccatactcagggagcccatgaagccctcactgctctctggagacttgctccagccagcccctctgctgggctatcttttgctacacagcatggccacagctctggcttccagctcaggtcccttgaaggccctgggcttgtgggcctctgtgatctttttttcatgcttttttttgggggttgtttcctggctggaatgcctttctacctcattacatctctcctggcatctcctctacatcttttttttttttttttttgaaacaggttttcgctctgttgcccaggctggagtgcagtggcaccatctcagctcactgcaacctccaccttctgggttcaagcaattctccctgctttagcctcccgagtggctgggattataggcatgcgccaccacacctggctaatttttgtgtttttagtagagacagggtttcatcatgttggccaggctggtctcgaactcctgacctcaagtgatctgcctgcctcggcctcccaaagtgctcagcatgaggctgggattataggcatgtgccaccacgcctggctaatttttatgtttttagtgtgtgtgtacatgacccttgaccctcctcccgccgcagatgtgcgccaccgcccttggccttcctctatatcttttaatacctcgatgaagggagatcctatttcacacatctctgtaggctctggcacaaagacccagtattattagagcccaataaatgtttaagtaaaaaaaagctgccttctcaagcctaactcatgtgtgttgggccagtagtgaggtgaagggggtgtttgagcaacacagtcattctactttccattcttttttttgtttttttgagacagagtctcactctgtcacccaggctggggtgcagtgcagtggcgcaatctcggcgcactgcaacctccgcccccgaagttcaagcaattctcctgcctcagcctcccaagtagctgggattacaggcacctgccaccacggccagctaatacttttgtattttttggtagagatggagttttaccatgttggctagactggtctcgaactcctgacctcaagtgatctgcccgcctcagcctcccacagtgctgggattacaggcatgagccgcggcacccagcaaaaacatccatttcttaaaaatatcttaaacatggcctggcctggcaccgtggctcacactcgtaatcctggctctttgggaggcggaggtgagtggatcgcttgagctcaggagttagagaccagcctgggcaccatagtgaaacaccatctctactaaaatacaaaaattagccaggtgtggtggagcggatctgtaatcccggatactcgggaggctgagccatgagaatttcttttgaacctgggaggcagaggttgcagagatcgcgccactgcagtccagcctgggaaaaaatacgaaacaaaacacaacccttaaacataagcattcatacctttaacagcctcaaatataagtgtctgtaccttaaaaatataattaggggccgggcacggtagctcacgcctgtaatcccagcactttgggaggccgaggtgggtggatcacgaggtcaggaaattgagaccatcctggccaacatggtgaaaccccgtctctactaaaatacaaaaaattagccgggcgtggtggtgcgtgcctgtagtcccagctactcgggaggctgaggcaggagaatctcttgaacctgggaggtggaggttgcagtgagcggagattgagccactgcactccagcctggcgacacagcaagactctgtctcaattaattcatgaaacggtacaaactttaattaattaatgcaaacttctaagtataaaaaggttcacttgtgtaccatctgaagtgccactcatgcggactctggcacgagtgggtgagagctggcgcccacgcaggggacagaaacttgggatcccagagctagaaacaggcgactctagaactttccgtggctgagcccaaggcccgggtgaaatgcttgacccgagagccctttcgatgggaaaccactgaagtggatcaaacaaaagaattcagagaaaagtagcttggactctttcaacaggatgaaactagcaaggaaggacggtgacccgagggtgcgggctggggaggaagtggagacagcagggcgggacaccaggtgagcagaaaggggctgagtcatggcccaagcttgtgccagccggggcagcgcggggctgcactcctggcacccacctcacggattccctctcactgttgtcaagtgacccactcccggggcagagatgcttcaggacaggcgggggagggaagccaccaagacagtggagaggtttgttctcagggacacggcagcatttggagaaacagtgcttgacgtgagctggccgccttggaggattttctgagttggcagtgttcatcccagggcttaaatcctcccggacagctaggaggcctcaattcttgagacaggtaaggcccgggtcagggacagagttcagagtaagaacaatcttattttcggatgataaaaatagcactactattgaaaaaaaatgtggaaaattttaacacacacataaacacacacgcacacacacacacacacacacacacacacacaatacaagctgtacaccacttctacagaaaactaccattaatattttggtgtttattccagcgtgcatatatatatatagccatataatatataattatgttaaaatgtatagttgtatttatacatatgatatataattatttttaagataaatgaggtcacattgtatgaatgcttttgggacctttttttttttttcaattgttaacttttaatcccaataaacattcttttagatcctctttttaaatagatgtagtaatttgcttaattaatctcatgttgattcatatttaggttgtttccaatttttccctattataaaaattgttggccgggcgcagtggctcatgcctgtaatcccagcactttgggaggccgaggtgggcggatcacctgaagtcaggagttcgaaaccagccttgaccatcatggtgaaaccctgtctctactaaaaatacaaaaattacctgggcatcatggcatccacctgtaatcccagctactagggagactgaggcaggagaatcgcttgaacccgggaggtgggggttgcggtgcgctgagatggcgccattgcactccagcttgggcaacaagggtgaaactccatctcaaaaaaaaaaaaaaaaagtctgcagtaagtgtttttactgcaatatattggtggtatttccttaaaataaattactagcaatggaatcgataactcaaaggataatattgttttaaggccttgtgataaatattgtaaatttgccttttaggaaggttgtgccttcctaaatgaggtcatgaggtcaggagttcgagaccagcctgaccaacatggtgaaaccccgtctctactaaaaatacaaaaattagctgggtgtggtggcacgctcctgtaatcccagctactcaggaggctgaggcaggagaatcgcttgaacccgggaggtggaggttgcagtgagccgagatcacgccactgtactctagtccgggtgacagagcgagactctgtctcaaaaaaaaaaaaagaatgtccatgtgaatgttgcaaacgctttcttatagggaccagtattaaatctttgtggttttaccctgagtcagaacactaagagcctggtttatttactgaccacttgctttgacgctcgtgagaaggctgttctgttgaagtcgtaatgctttgcacccagtaggagctcaacaaatgcctaatgagctgaactcaattgagaaggtcaaggggctaagcaaacatgggggtgctgcatcattgccatttagagagtaacgagttatctgaaccagcgacaggaatagtgaatggtgagtgttgaaggggcagaaataaagaaccaagggatccgttacagaaggctcagaccttgagctgcagctttgagagggaatgcctggagccgaaatgagcgatacatacctaatcacggccagcaggtggcgctctaaagatgtctcgttgctatccagactcccagccaagatcttgctggagcaccgggaagtggaaactgagtgaggcatggggaacctctcagccctaactttttgcgctgtgcttcctccggaagtgcagttcccaagatcaggagccctgtaggtatttttgctttgttttcctatgcttgtttggcttgtgggtgtctctgtagagcaccatccattcaattcagtttcgaacagtatggtctcgaactttgatgagcaaaccctcacctgcttctcttgtgaaaatgcaaattctgattcagtagaactggggtggggcctgagattctgcatttctaacaagctccctggtgatgactcatgcccagtagttctaaaatttgttagaacatgctgtgtaaagttccatctctatgcaatatgggaggtgagagagaagcaaatccaggctcttctctcaaagggtttaccagagtgaacacaatttcacagaaatgtctgaaatacaagttagagtgtgagcccactcacggcatgaccttgggcaagttgcatgacttctttgggtctcagtttcctcatctgtaaaatgggaatagtaatagcctctaccttagaaagttacttgagaattaaagcaggatattgtacataaaacacttgcacagtggctagcacatagtaaacctcaacaaggcttggggcaccctaaagcagtatggagtcaggcaggttaccctggcagggtggtaaattggaggaagcaagtggtgggggtcaatccttaagaaggcgccatcttgggttgggtgcattggctcgcgcctgtaatcccagcactttgggaggctgaggcgggtggatcatgaggtgaggagttcaagaccagcctggccaaaatggtgaaaccccgtctctactaaaaatatataaactagccaggtatggtggtgggcgcctgtaatcccagctactcaggaggctgaggcagagaattgcttgaagccgggaggtggaggttgcagtgggccaagatcgcaccactgcactccagcttgggtgaagaggatgccatctcagttgtcaggatatccatcatctgagaagaagggtgtcaggaggtgaggacagagagccaggaagaggtcaggtgccttgattagcaggtggcaaacccaagagctgcttttgagggggatttaagtgtgctgaggctaagcaggaagcagccttccttctggagatggaggtgggcaggatttccaggcagatcaagcagcggctttccacacacgcccctatttcacatctttaggagctttaggaacttgcgagaggagctaagaggagccaagtgtcaccctgatcctgcctgcgtgcatggctttgccacatcctgtaaaagcctcagtcccactgctatggattcctcagcccaggtccctaagtttacccacatgctttaaataggggtgatgtttctatgaacctctaagatccacaaatatttatggacttaacctccagggctctgatgagtgcccctggggatacagagacaaatccacacagcccctaccttcacggctgaccctggggagaaaagacatcaccccgggaaaaggaaaagaatgattagtgaagggtctcctagcccttcttaacaatggtgcttcttctagatcgtaagactaattgatgcatgagacctacagccactgcagaggcaagagtgttcaggggactctttagaccagggtgtctgacctaataaagccataaggagtgagtcagatctgatagggctggaaggggacaaccactaacagctaaagggactaattggacttgggtggagccaattacgcacgttatctcatttaagccctacaaaatactatgaggtcagtaccagcattgtttccgtttatagatgaggcaaatgagactcagagagcaaagcaacttgctcaagttctttttttgttgagatggagtcttgctctgtcgcccaagctggagtgcagtggcacaatcttggctcactgcaacctccgcctcccgggttcaagtgattctcctgcctcagcctcccgagtacgtgggattacaggtgtgtgccaccatgcctggctaatttttgtatttttagtagagacaggatttcaccatgttggccaggctgttcttgaactcctgaccttaggtgatccactcgcctcggcctcccaaagtgctgggattacaggtgtcagccaccgtgcccggtttcaagttctcacagctacaagtggcaggtggaggctatgggacaagttcattctcttgtgtaccatgttatgtgcttggcccttgtggagagacaaacaacactggcattcactgtctccccaccttaagtagtgacagctcttccccatgcctttaccctccaaatacggggatgaaggcaggaaagtggaggagagaacaggacatctgtctggaagaccagtggcttccaaactacacatgcaggggagatgggaaggctgaaggcctggctgagaacttgaatttcttctttccttcccgaagcactgaagtcttgctcaaccccagctgagtgatgaggcgggcagggttgcctcacttcagggcagcaggccccagccttcctggctctaatccatttcccatccttgcgtatctttggtcggacggtgattctcactcttcctattgacttctactttgtgtcagcaagttcagcgtgggccccgtatgctgccgtggatctgatcagctgaggcctgagacacaggaccaggtacattgggaggaaagagctgattggagaaggtctgggccacatgagggtttgcctgagagatgccagaatggggggctcctgatgtctgaggaccctctgtgcccatgaggcaggcggattgtcaaaggctgaggtccatttggaaagttggttatgtccctgtggcatgagggttgggtgacataaagagacggctttggtggtttcctgaaaccatatcatttgcgcacatcttccccctgatattctgatcaccttgatttggtttcctatttcctgaactgcccacatagcatttttctgggttgcagagggagttcatagggttctgacaggtttatctggagccaacagagacagtcagtgagatgcactgaagccatgctgagctgaccaagttaggggcttgcgatcatgtcctgggaccttgacttcactgctcatgggccatttgcttccctctgaacgtgttttctcatctacaaaatgtaagacatctctatttttttggatgtttgtaaacttaagcagaatgatgattgtgaaggtgttttgtaaactgtatgattgtattcttcagggtttggggttacttttatttcattttgtaaatggaactagatgatttttcctgataatataatatctgataaaaatttaatcagtacagagacattgaaagtgtttgcataattctatctctaaagattaatattttggcatatagacatctagacttttaaatgaatatttttatgtcaaattctacttactgtctttcaacctttttttcacttaatagtatctcttgagtgtcatctcttgttaattcataattatctaccttgtcctttttaacagctatgtagtattccattgtgtggctgtaccatgatttattaaaccagtctcctattggtgggtgtttagggtgtttccaatttatttctataataataaacagtgccacagtaaacatcactgaatgtacatctttgcatactattatttccttagaataaatccttagatgttggattgctaggtgaaaggttgtacatatatttagttttcattcatttgtccagattcccttaagaaatgtcgtaccatggccgggcgcggtggctcacgcctgtaatcccagcactttgggaggccaaggctggcggatcatgaggtcaggatatcgagaccatcctggctaacatggtgaaaccccgtctctactaaaaatacaaaaaattagccgggcgtggtgttgggcacctgtagtcccagctacccgggaggctgaggcaggagaatggtgtgaacttgggaggcggagctggcagtgagctgagatcgcgccactgcactctagcctggacgacagagcgagactccatctcaaaaaaaaaaagtgtcataccatcttatttatttatttgaggccgggtcttgctatgttgcccagcctggtgtgaaacactggcctcaagagatcctcccacctcagcctcctgagtagctgggattacaggcttgagccactgtaccttcatttgcttagtttttagatacatatcactgattcctctctaacagacctataaaattcctggcaatatgatcaacacattagattatctctcagtctctattatctattagattatctctcagtctctttctcttattcctcagagacatctgcctggtgcctcatcctactgctccctcttggattggtttctccccaggactgctgaatgttgtcatcttaggagttcccttttctctttcttgtgtgaatcctctctcttttggataccaccttcctttcttcctccctccctccctccctccctcctgcctcttctctctttctgtctctctgtctccctctctccctctctctttctctctttctttcttttttgagatgggatcttgctctgttgcccaggctggagtgcagtggtgcgatcacagcttactacagtcttgaattcccgggcttaagccatcctcccacctcagcctgccaagtagctggggccacaggtgtctgccatcatacttggctaattttttgcatttttttagagacgaggttttgccactttttaatttatatgtatacttttttttgccactttatagttttaacatttatttatttatttatttatttagagatagggtctcactctgttgcccaggctggagtgcagtggcgcaatcacagctcactgcagcctcgacctccctgggctcgggtgattctcttagctcagcctcctgagtagctgggactacaggcacgtgctgccatacttggctgatttttgtattttttgtagagacagggcttcaccatgttgcctaggctgttctggaactcctgggctcttgcctcggtctcccagcgctgggattacaggcgtgagacacctattttccatttttaatgtgccttgcccattttacattttttattgtggtaaatagatggagtctcgcactgttgcccaggctggagtgtgatggcgcgatctcagttcactgcaacctctgtctcccaggttcaagcgattctcctgcctcagcctcctgagtagccgggattacaggcgcctgccaccatgtccggctacttttttgtatttttagtagagatggggtttcaccatgatggccaggctggtcttgaacacctgacctcgtgatccacccgtctccgcctcccaaagtgctgggattacaggcatgagccaccgcgcctggcccattttaatcatttttaagcgtacagttcagtggcattaagtacgttcacattgttgtgcttactgtcaccaccacccatctccagaacttcttcatcttcccaaactgaaactctgtacccattaagcactgaatccccattttcccctccctcccaggccctggcaaccatcattctactttccgtttctatgaatttcactcttctaattacctcatatgaggagaatcatacagtacttgtctgtttgtatggatctcacattttcccctttattttcttccctgttttggtgacatgcatcttccaatgacaggaggtaattttgataggttttgactatctggaaacagtccttcattctattcttatacttgttgaagggtctggcttgatttagaatacttgttggaaatgatttttttctctgaatgttaaaggcaatggttcattgttttcaagcttctagtttattgttgaagtcttctgctattatgattcaggatcctttgtacttgtcctggttttatgtctgtggaagtttttaggagtgtcttgtcatccctaggattctgaaatttcatctgtgggtgttttttcatcgattgtcctgcgtactcaggagaccctttcaatctgggtgctcatgttattcaattctggaggaatctcttgaattattatcttaaaataattccttcctcctcatttcccctgtacttgctttctgaaactcctattatttgaatattagactttggggtttatcctctcattttcttcctttaatctcctgtttgggtgatctgtcttttgttctcctgttttggaagattttctcaatttaatggtcatgctcttcaaatgaatattttaatttcaaccctcattgatttttaaaaagcgctcttgttctcacttctttttttgaagccccgtgttcttgtttcatgatgtaatgcttttgtttatttctctgaagatattaaacattttttccagcttacttatgctccctgcattgtgtctattgctgctgaatctctctctctttctttttttcttttttatttctttctttttttcgagacagactcttgctctgtctcccaggctggagtacaacagtgcaatctcggctcattgcaacctctgcctcccatgtcgaagtgattcttgtgcctcagcctcccgaatagctgggattacaggcatgtgccaccatgcctggctgatttttgtattttgacctcaagagatctgcccaccttggcctcccaaagtgctgggattacaggcatgagccactgtgcgcagcctcttttttctttttcttttcctgaacctatggattatattgaagcccttgaatttcttttatgctattttgttctatctttcacattggaggcttcctcaaatgtttgctgattccttgttgaatgttcatttttatgttcaaggaactagaagccgattgaagggtgtttgggtctgtgtctgtgcgtgtgtctgtatctggccctggttgttggatctctgtgtatggtgatcaaatggggggaccagtccaaatgattgggaaccccccagaagaatgctccaatctcctgcctggaggatacaagccaggctgctaacattctagggggcatcaggggacacgagggggtctcatcattctgtatgtagcttcaaagacttcccctctcccaaatccttcttccctttatgtagtgacttaaccctgccctcggatgtgtccagtctccccagatctggagctattctggtttagttcctccagaaagcaaacctccttctcctgctggggtgggagagaagtagatgccttggcttgttgattgcctgggctgtgaagcctgtgttgaaatgctttgtaaacacatcatatgtttcgacagatcttcctgtttttagccccaccctaccttgcttttcaaagtagcccgcacctccagttactgagactttctggagttagaggcccagcactgcttgcttctggttggcatttagttttcagccttttctgatctactgcgtcagctgtcgcttactcatccactttccagcttccaaaatcctgttgacatcccttgtccactgttgtttcctttcctatcatctgtccctgtgggtttataccttttaaaatttttgttcgatctttctttttggtgggatttcaagaggaagtgaagatacacgtgtttaatccatcatggtaactgagatggttactgcatttttcactctgtgaccagcatggcaggagacagtgggcttccttacactttactaacattgggtattaccatttgtcttaaattttgctaatctgataagcaaaaagcaaggagatatctcagtgtcattttaatttatgtttaaaagttattaatgatgtagctgagggtcttcttaggtgtttattggccatttatatctcttctatgaaccatctatttgtgtccattgctcatttttctactagggcaggacgactgttaaattattaatgtatggccagctctataaaaaagtttatggctgcttccttccttccttccttctttccttccttccttccttccctccctccctccttcatctctctctctctttctcttttctttctctctctctctctctttccttccttcctttgttctttccttccttccttccctccctccctccctacctccctcctttctttcttttcttttccttttcttttctttcttcctctctctctctctctttctctttctctctcttcttttttatttttttgaccaagtctcactctatcacccaggctggagtgcagtggtgtgatcacggttcactgcagcatcaacctcctgggctcaagtgatcctcccaccagagcctcccaagtagctgagactataagcacacaccaccatgcctggctatttttttttattttgtatagacgcagtgtcttgccatgttgccctggatgattttgaactcctggcctcaaacaatcctcctgcctggggctctcagagtgctgggattacaggtgtgagtcaccacacctggcctgatcccttattttcttgtatatgcagtctcagagcagacttcagaaaatagtgattcttaatgaattcatctaaagtgtttgacgattttcttcccttagattatcaaagtaacgtgtatttgctatagaaaatttggaaaatactgataaacacaaaaaagaaaatatgaattactcagagataaccaccacttataaatatatccagtctaatacatataaatatattccagtctttttttctgagcatatacttataaaaagaaaagtggagtaattttattttgtgtcatgctctcaacttatgaaatcataatttgttttcatatgcattgttctatgacatcatttccagtgaccatacagtatttctttgcatgtatatacaatcatttatttagccaatctcctaaatgacacacatttaggtttctattgggttaaaattttgattaacaagttcctctcttgatcacgaccccatctaatcctgtttccaccatgtatctgcttagcattctctttttttgggggaaaaaggaaaaaggtaaactttaattctttttcaggttacattattactaattccaatttaatgaatacagactcatagagattttctagcactttccatgtttgttgctgggtcagagggagtgatcgggaagggtcattctgggaccctcattagatacctccacagctttgcatcacagtgaaactgacgagggccagaagcacccatgaaggagtgcaagaaggaatgaggagaataaagaagcagatcacccgagaaataatagcttaacggagagaaaaatccaaagacacagactggtctaagagctgaagacctgaattctgtccctgagtcggccactaacgcagtctcatgtgtccttgggcagatggctcaacacttccctggttttcttatgtggcagattatttcaaggttctcttctacgtctgagggtctatgaatgctgaccttgtcatactagctgtgtgaccttggagacgttgcttaacctctctaggactgggtttcctcatctgtaaagtgggaacatgaatagctgcttcatagcattgttgtgaatgagtgtttgtaaagcacttacgagagttaagttctctgagcctgctctggttcaagaggctgcccccccaaaataaaaaataaaacacttcacacagggcctgtcccatactaaatattcaataaatgatagctatttttttaaattgcatgctgactgttatgtaagaagaggacaattacatcatcccacactctgtgtacagaaaggactcttggcttctcaaaagtggtttcaaagttcaatttgcatctgggacagatgccaaagggcaaactacaaagtcaccactggccactgacctccattctcagcttattcttccctggggcctggacgctgtccagatgtaggtcaagtaaacaggctgctgtttaacacagataagtcagatgtatgaatgctggttgacaggggaagcaaagggaagccctttatataagcccttgtaagtctcattatatatttttcaaatataaaatacctatgagtgtaagagaaggagaaccaagccttagattatatgaatcatcaatgttagggatgctattaaggaaaagctgacgtactttgaagttgtcattgatgagcatggagacaggaagcagaagttgtgggtgtagctgaagttttgctctttgctggtgtgtattcttggacaaattacccttttctgtaaattcagtaggctggactatatttttattccctaagtgatggtctgtgtactactggtgacaggcagattgatgttaagtggtaagagatgcacatttgaaatttcaatagttaggtatttattttagggaatgttagggaaaatatgattaacatcaattctatagtttcatagagatgatcatttagaatgaggttaatggaagatttaagctaatctttaaataaatgagtacattccaataaatattcaaagatgatatgcagaaacagcaaataatgtgcaggtggtacaactggaagatcagaaaggggtaggcagaataataggccccccaaaaatgttcacatcctaatccccagaacctgtatgttaccttatatggcaaaagggactttgcagacatgattaaattaaggcttttgagatggggggattatctgggtcagctcaatgtaatcagaagggtccttaaaagagggaggcttatcaaagtcagagaaggcaatatgatgatggaagcagctattggaacaaatgcagccacaagccaaggagcgctggtggcctctagaagctggaggaggcaagaaactgactctctccgagctttcaggaggaaccaacgctgcccgacaccttgattttagctctttaagtatcggtttagacactactgaccttcagaagtgcaagaagataaatctattgttttaagccaccaggcttgtggtaattatagcagccacaggaaacaaatacaccagaccttagatgcccatgaagtggttcattctgcaagatcagcaattccttagggcatagaaaggaacgttggcaagaataagactatccttagtcattaccctcaccctcccaggagagggctgactctgccatcacattctgcagactggccaaggagaggaagggctctctgctccaccgggatggtgcttggctagatgtcagggtgggtcctgactcactcactgtcaacaatgtcatctggttcaacctgctcattttacagatgaagaaactgaggcccagagaagggaagtcactttaacaaaatcagctgggatggcgctgatttggccaaggtgaataacatgaggcatggctgggttctcacaccagtgtgggagccctgagaaaaggtggtgcctgcaatggctgggggtggagggtagaccttgctgtcctttgatcctctgctctatgtctctgggcctcttgctttcaaactacttcctctaatatctttttattggggtgttaataaccatcctgttaacacataatctttagaaaattgttgaaacagcaacgtgcttggagaaagggctcccctgcctctcccctccacccccacctttttttgttgttgttgacggagtctcgctctattgcccaggctggagtgcagtggtgcgatcttggctcactgcaacctctgcctcctgggttcaggtgattctcctgcctcagcctcccaagcagctgggattacaggcacccgccaccatgcccagccccctgcctcccctttatcttgtccccagcacttcagtgaatgtcttctcttctgccaggcctgcttccctctcctggaaggggcatttctactgtgattaacatggaaactgggatgtttcaggtctgcaattcagtgtttatgagtaaaaatccacctctatagtataggcactcctgagtgaagaagtcccgtcgcctaattttcaacggaaaatgttttccatgtaaaggccataaaaccaccttgtaattttcttttttccttttccttttttttttgagacggagtcttgctctgtcacccaggctggagtgcaatggtgcgatctcggctcactgcaacctctgtctcccaggttcaagcaattctctgcctcagcctcctgagcagctgggattacaggcacccactaccacacccggctaatttttgtatttttagtagagacagggtttcatcatgttggctggtcttgaactcctgacctcgtgatccacccgcctcagcctcccaaagtgctgggattacaggcatgagccactgcgcccagccctccttgtaatttcgaagcagacatctagatttgtgttgtatctcatagggatggatgaaaactagtgtgaaatttcttctgtgatcccatgtactgttattttatcatattaagttttagttttaaatggttggggtattattttgttcttatttcgaaaatggtcaccagacaagtgaccccccctagagaagcaatccttaacattccagattagtgacagttgacatcccaggtaattctaccactcaaagtctcagatatcattatgttttcagttagtaggtgtttagaaggtatgaaattgaaaagattgtagggcagaaacttacactggagagccagtatatatgttcaaaagagggaagtgtagtccgggtgtggtggttcatgcctatcatcccagcactttgggaggctgagacgggcagattgcctgaggccaggcggtagagaccagcctgaccaacatggcaaaaccccatctctactaaaaatacaaaaaatagccaggcatggttgtgcattcctgtaatcccacctattcaggaggctgaggcaggagaattgcttgaacacaggaggcgaaggttgcagtgagccgagatcaggccactgcactccagtctgggtgacagagcaagactctgtctcaaaaacaaacaaacaaacaaacaaaaaaggagggaattgtacatgacaacatacataacatcaggttggactaattagggagtcatagcagaagtgaattaattcctaagatctgtgttgcagaattgggagcccttcctttgaggctttactgacatgagtgctcaggtcactcttgtatctactggggttacttggctgaaaggctgccttttaaaaaaattttaacagatcctaaatccataggcttaggaaatagtttacatcatttacaaagaattttgaggaaattaccttgctttgttaagtttggatgcatccttattttttaaactttagaaaattacacgtttaagacatttttgataaaaatacagaaaagaaaaaaaggaaggaagaacagacgagagagagattagactgtgatctcacctcattttggtgtttttgtccctagaccctttgtctaacgtataacgtatgtatgttgttctactttacaaagatgggatcccataccgattgttgagttaattgcttgattcatttaactgcatattgtggacattttccttattaatattcttctgtaacgttgttaccatttggttactattatattgtgtagctattacatcattccacttcattagtcctttagtccttgttgttcctaattttttgctaaacaatgctttgatgaacatcctgttggacaatttgcacacatccttaatacttccctttaggtaaattcctagaagcagaacgctggatcacaaaggttgcacctttgttttttgttttgttttgttgttttgtttttcttttgttttgagacggagtcttgttctgtcgcccaggctggagcgcagtggcgcgatctcagctcacaggaagcaccgcctcccgggttcacgccattctcctgcctcagcctcctgagtagctgggactacgggcacccgccaacatgcctggctaatttttttttgtatttttagtagagatggggtttcaccgtgttagccaggatggtctcgatctcctgacctcgtgatccacccgccttggcctcccaaagtgctgggattacaggcgtgagccaccgcgcccacagccctttgtttttttaatataaagtttttattccttttacattttttgtagagacgggctctcactgtcttgctcaggctggtcttgaactcctgggctcaagcggtcctcttgccttgctgccacggtgctgggattataggcgtgaacccccatgcctagccgaggttccacgtttctaagtgtttgatacaggctgctaaactgcttaccaagaactgtgacatcctccttagcccttttcacgagggtgctcgtttctcagtgctcttgtatgcatttgtagtctaatgttttagaatctcttatacctgttggatgaaatatagactctcttctttgctatcctactttgaatgtgtttgattaggatcaaggcaggatatgattcacatgtttcttagccacctgcatttaaaaattttgtcaattgcttcttattgcttgtttctaaagggaagttctttattagagttctaaactaaaaaagtgctttgaggccaggcgcagtggcgcatgcctgtaatcctagcactttgggaggccaaggtggaggatcgcttgagcctaggagtttgagaccagcctgggcaacgtggtgaaaccccatctctacaaaaagtacaaaaattagctgggtgtggtggcacatgcctgtggtcccaagtacttgagaggctgaggtcgggggatcacctgagcccaggaggtcaaggctgcagtcaactgtgagagaaccactgcactccagccttggtgacagagtgagaccttgtctcaaaaaaaaaaaaaaaatcattgaaagcttttattcattgaataaatgttaactgcccataacatgccaggcattggggccagagataaataagtcatggccgctgccctagatgctaccttaaatgtaaaatattaaaaaaaccttgactaattttttctccttagcacttgttactgctggcatactcagggttctttgtcttttttttttttcttttttcttttttgagttaaggtcttgctctgttacccaggcaaccaacccatggtacaatcatggctcactgcagccccaaatccctggcctccagccatcctcccacctcaggctacagaatagctaggattacaaatgtaagccaccttgcccagctaatttttaaatttacgtggagatgggtctcgccatgttacacaggctggttttgaattcctggcctcaagtgatcctcccaccttagcctcctaaagtgttgggattactggagtaagcccttgagcccagcctctctgtctatttctgtttcccttctattttccttctttttgttttttcatttttagaaaatctccaggaaggaaagaatttagcttcttttgttaattgtgctatgccaggcatctagaacagggccaggccctcattaaatatttgttgaatggttggaagcatgatcttttggtcctggcaactttgactcattggcttacctggtaatgggaatcgggctaaaattgcttaataagcttagactggtaagaaacactccatttcttttcagccccgtcatttcattagtctagtttgggagtaggtaaacctggcgccaccttgtctgtataaaggtatgtgagcacatatcattttttcccagggacagtcacactgtttatggaggtgtgatgtcaacagcccttggggttgccaggtgttaacccaatgggcaattaacagtgtcatgccatccttttcttgggaggcagctgccactctggggtgtgggtagtgcctgtcacgtggtcgggatgagagccaaggatgatagtgaagcctgaagcttggggaagtcaggaaaaccgtgaggttccagatcagcaggaagtccacagttaagggagccttctgggaagaaattaggaccagccagagattcatgggagcatggcagggtatcaagttccatcaataggggagaaaaggccagacaaacctcaataggggattaaaggctcttgaaacctcagtttaccccccagataaggatgaggtctctttctttccaggtaccatcacccagggcaggaccttcataggaaggcctgtttcagccgcaacctaaactgttctcatttttctcttttctaaaagccaccttccagcaggctacacctggcggcctgcacaaggcaaagcaccttcctggcaagggagccaagggccagaagcaggccgcattctcaggcacagtggaaagggaaggaaagggaagggggcttggaacctaagacactgcatagcaaattcatctctacccaattccagcctttctgttgacttacagccaactggagtttgaaagtgtggggataaactgatgggagagctgaggtttgggagtctgagctgctttgagtggtcggtgagctctgtttgctccagaagctaatgaggatgcaataaagacaacaaatagaaccttctttccctttgggctattcctgggtataggaatagcccaggctggctgtttgtggctggctgggtcagggaccgaaccatagtgagcatttttgaatcggacatgagttggttaccattcaaagtcttggaagggaggctgggcatggtggctcatgcctgtaatcccaggactttgggaggccgaggcaggcagatcatttgaggccaggagttcaagacctgtctggccaacatggtgacaccccgtctctactaaaaatacaaacaattagctgggtgtggtggtgcaggcctatagttccagctactcgggggcgggaggctgaggcaggagaatcgcttgaacctgggaggcagaggtctcagtgagccaagctcgcgccactgcactccagcctgggcgacagagcaagactctgtctcaaaacaaaaacaaaaaacagacaaacaataaaaccacccaaagtcttggagggggaaattaatctcctggttgaaggctctggcattctgtggactgcccagcaagccatttatacgaccaatatttattgagtgcccactcagtgacaagtgttatgatgaaaaattaagatgcatttctctatttaaggcatttgcatgtacttttatgttcttttaaaatttcacatcttggttacatcttatattgcagtctttggttttaagggccttgacaactttacggaggaagagaatcctatgaatatgaagccctattttcactcagggagcagccctgccacactatatcctttgccatggttgtttttctttatagcatttctcatgacctggcagaaatagattagtctgcttgcttgttgtctattttccctttagaatataagctaattatattgggtaggggttgggggtgctttttaaagttgtggtgggatatccatggcttagaacagtgcctggtcctcagcaggcactaaactccttgctaatgaatgaaagacttttctctctatataaaaccacttctcgcctcaaggctcaagtgtgtgtggtgtgtgtgtgtgtgtgtgtgtgtgtgtgtgtgtgtgtattttttttttttttttttccgagacagagtctcattctgttgcccaggctggagtgtagtggtgtgaccttggctcactgcaacctccgcctcccaggttcaagcaattctcctgcctcagcctcccgagtagctgggattacaggcatgtgccaccacacccggctactttttgtatttttagtagacatggggtttcaccatactggccaggctggtctcgaactcctgacctcgtgatctgaccaccctggcctcccaaagtgctgggattataggtgtgagcccccatgcctggccccaagtgtatatttttaagatttttgtttttttgagatggagtctctttcacccaggccagactgcagtggcatgatctcggctcactgcaagctccgcctcccaggttcacaccattctcctgcctcagcctcccgagtagctgggactacgggctcctgccaccacgcccggctaattttttgtatttttagtagagacggggtttcaccgtgttagccaagatggtctcgatctcctgaccttgtgatctgcctgccttggcctcccaaagtgctgggattacaggcatgagccaccgcgcccggcctatttttaagattttaaaaacacattattattaatattatttaattacaaaagcaaaggatattgcattagggattatagacgctatggcctgggtttaagatttaggctagagaaaaggcatagttgcctatgacccaaatcttagttcctttgtaacctatatcatctaagttcagcctttcataccagcgaaaatctctgtctatggtgacttttttcaggatttggggtattttccagaatgttctgtcagtcttgcctttgaagttatagccaccagaccattggttcattctttcactttcgttgaagcatattaaatgagtgtttgctaagtgcctgttgctggggatatattaagacaatcaacactgtccctacactcagtgagttttggtttcttgggggagattggacatctctgtaaccaaaaggccatgtttaataagtctcttgtgaactgtgtagagctccatgtgagctcagaggaaggagtgctcactttgggactttgagtatcagggaaggcttcctggaggagctagcatatgagtgagacttcaaaaggcagaggagaaggtgggttggccaagcctaggcagcagctgcagtgtaaagggcaggggaagtcaacaagataggcccatagaggaagggaatcatctatttgggggaccatgctggtgggtctggccagacctagagaggtgatccataggatatagaccgtagaagtgggctggagttgctttgggaaggccttgagtatgagactactttgttccttatcacaaaggtaacaagatgccaaaacaagttttggaggcagggatgctctgcatacagtgagattttagaaagattattcttatggttatgtgtggactgctgggctgaaacaagaagaaattcgagggagagaagtttggggagagagggacagacaaataagaaactttggattatgggcgatgtgggaagaaagtactgaaatatgactagatttacttgagtttaggaagggaaagtctttgggctttggtgaccacatgcgtgagatgcaagctggggagggaaatgattagggggatttgatgagtgccttgtgcttcactgactggaatgatggcaccattggcagaaacatgaaaattgttttggaaatttctgttggggcaaaggaaaatctgtttggggtttcggcatgtagagctggaggtggtggtgggacatctggtggacatatctgccagaccattagcaactggccagtcagtgggtgtcccttgcccagctagatctatacccttagagattagcaaaaaatgctggccaaaggaatagagagagattaggttgaagctgattttgagatgtcttgctcacctgattcagtagagttaagtatgccccatctcgtcagaatttccacagtgggcctgtgtgcattacatatcaccttctgtgagtgtgtgatgtggccgaagtccagcatctttactagctagggttcgggcttgtacccagatctctcttagggtagccggtcaacctccacccttcccagtggtggaatctggcctctgtttcctgaatctcagagtttgtgacaggagagatgttgggatcctcatgcatgctctcagggactgtgacattaacctctttggctcaatccaagaaagaccttgtactgggacccatgcctcggcaaaccccttcctaatgatttataaaggcagagggtagggcagccctcactcaccttttttaccaccacaagggctggttttataacttctgttccctttcggggctgatttccatcttcctttccactttattttttctggatttggtatattggaagcaggggctggggcaaaggttgctgatggttaattgccatgcccagcccctgggcccatctcccagggagaaagctcaaccacaagggggaaggaattacatcagtttgggcccttcggcacctcttagaatcctgccaggcaaagcccgttcattaagataaggccaatagtccagtcctgacaaacaccagttttgggtccaggccgcgtgggaggggtggcagcttggaagatgatgccaacattttccgaggggcctggcctgccattagatgactcagtgcgtttcccagcacctcagccaggaggcagggagagagccgcagcccttattaatttttttcctcttgggataggactgttttgtcttggcaccaggtccacaggaaagccttcattcatcccctccctgtctgtgatctcatcagccagagcacagcttcacccagggaagcagagccccagagcctgaacgagctgtaccagtccattgtcccaggccactggccttgaagtaagacctacttgagtttaagccctagctcctctgggtctcagtttacaatatgtacaatggaagcaataatcacagcctcacaggctcattgtgaggactgagggagggaaagcatgtaaagcacttagcacagtgctctagcccaatacatggtagtaattgctaatactcccccttcttgagtagcaatataatagttgttaatagtgtgttttctggagagttagacaattcgaacagggtgggtttgaggcttgaggcctcatctttctagttgagagactttgggaaacttcatcttgctgagtctgtttcctcatttaaaaaatgggaataacactacctatctcatgggattactgtgaggatgaaattaagcagaccaagtgtttagcacagttgccagtgcatacaagagaacttcggaaagttcatagaaaaatggaattaaaagataaaattaaaagatataaactttatttctcaacgtaagctccctcaaggtcaagacacctttttttttttttttgaaacaggcttgctctgtcacccagtggcatgatcttggctcactgcaacttccacctcccaggttcaagcggttctcaagcttcacccacctgagtagctgggattacaggcacatgccatcacattcagctaatttttctatatttttagtagagacggggtttcaccatgttggccaggctagtcttggactcctggcctcaagtgatctacccgccccaggtctcccaaagtgctgagattacaggtgtgagccactgtgcccagccaaggtcaggatactttcgtaaccatgatatcagccatttatttagtacatccctaaagaattgaggatctggggattttaagcatgttaatgcagtcttttttacattattaactgaagaaaaatggctaccctttaaagagatatatatatatatttatatataaatatatatattatatataaatataaatataaatatatatatatttaatggcaggccaatatatatatattttttgagacagagtctcgctctgttgcccaggctggagtgtagtggcgcgatctcggctcactgcaagctccgcctcccgggttcatgccattctcctgcctcagcctcccaagtagctgggactacaggcgtccaccactacacccagctaattttttggatttttagtagagacgggttttcaccgtgttagccaggatggtctcgatctcctgacctcgtgatccgcctgcctcggcttcccaaagtgctgggattacaggcatgagccactgcgcctggcctaaagattttttaagattaggaaacaaaaagtcttcagagggagccaaattgggactgtaaggtgatgtctactgattttccactgaaactcttgcaaaattgcccttgtttgatgagagaaatgagcaggaactttatcatggtggaaaggtctctctgatgaaggtttcctgggcatttttccactaaagctttggctaatcttctcaaaacactctcgtaataagtacgttattattctttagccctccagaaagcaaaatgcctagaacaacccacaaaatggttgccatgatttttgctcttgactggttcactttgctttgactggactacttccatctcttggtagccaccgctttgtcttcaggattgtactggtaaagcgaagtttcattcttggttacaattcttcaaaaaaaaaaaaagcttcaggatcttgatcccacttgtttaaaatgtgtgaaattttgaaagctctgttcttgtcagcagctgacctgggcacaatggttttgccacccattgggtggaaagttagctcaactttaatttttcagtaaggattgtgtaggccaaatctgttgagatatctgtggtgctggctattgtttctgctgttaatcattgatccttttcaattagcacatgaacaagattactttttttcctcacaaattgatgtggagggtctgctgctgtgggcttcatcttcaacatcatcatgtttcttcttaaaatgaattatccatttgtaaactgctgacttcttttggggctttgtccttttacacttttataaagcgtcaatgattccaccatttttccacccaggcttcaccataaatttagtattttgtattgcttcaattttgtagaatatgtgttctgatagggactctcttcaaactgatttcttatctttcttggtgcttcaagctagatcctgttcagacatgttatagcaagttagaacaaatttattttggtgcaaacatttattttatttttttagagacaggtgtctcactgtgctgcccaggctggtctcgaacttctgggctcaagtgatctgtctacctcagcttcccagagtgctgggattacaggtatgggccaccatgcttggccctgtgcaaaaaaaaaattggaaatccatgcatagttttttcataatatgcatattattcataatattattcataataggcatatgtaatatgttacctttcccacaaaccccattaatcccttctctgatctttattgatttgggtacctcttacaatccatcttgcattgttcctgtttatgtccatcgccctcaaaaatataaactgggcctcctaggctcactttgttttcaccttgaggcatgtcttacacattatttttgtgttcacacccacaaatccaatcctaaaagcactgaaattggaaaggattacattgcgtgccgcatggaggctggtgcctgtaatcccaggactttgtggggggctgaggtgggaagattgcctgaagtcaggagttcttttttgttttgttttgtttgtttttagacggagtctcactctgtcgcccaggttagagtgcagtggtgctcactgcaacctccgcctcccgggttcgagcgattctcctgcctcagcctccggagtagctaggattacaggtgcccaccatcatgcctggctaatttttgtacttttagtagagacagggtttcaccatgttggccaggctggtctcgaagtcctggcctcaggtgatttgcccgcctcggcttcccaaagtgctgcagcgcctggccgaagtcaggagttcttgaccagcctgggcaacacagtagaccccatctcctaaaggaaaggattaccttgtacattatacagcaaaagttcttaaaattgtttttaaaatgtatctcttcctttaagtttccactccctatgtaagttgcctatccctctttccctcctttttgggctagtatcgtctccagcttgcttccaagtccgctagggaatacacacgcgcgcacacacacatacacgtgtgtgtttacgtactaaaaatatataaacattaataatgcaagatggggccgggcgctgtgtctcacgcctgtaatcccagcactttgggaggccgaggcgggcggatcacgaggtcaggagttcgagaccagcctggccaacatggtgaaaccccgtctctactaaaaatacaaaaattagtcgggcgtggtggcaggcgcctgtaatcccagctactagggaggctgaggcaggagaattgcttaaacctgggaggcggaggttgcagtgagccgagatcgcgccactgcactccagcctgggcaacaagagcgaaactccgtctcaaaaacaaacaaacaaacaaacaaacaaaaaccaagatggattgtaagaggtatatatatacacataggactccatttcttgggggacctggaggggagaaagtcacacccatacacacacgtacacgcatgtatacaaaaatgaatatatgctcagatatatacaatatataaatgggcaaatataaaatcccctttgtgccaacgaatccattcattcattcatcaaatatttgagcgtccactttgcctagaaccaagttatctgttgggatgagcaaggcataagaggttctagctctcatagaacttagaattctactggaggaagatgagaacaaatacaaaatgtaaacagtggaagttctgtaaaaacaacacagagctttgtgagagtgatgcttagaatgctcctgatgttccattgggtgttcgagcagggggaatggactcggaggtgaactatgagccgagattcattttataaacgggaacacagacacatggacacttgaagggccttggtggccagaaaactgaaggcaggttcccatccgtcttggcaccactctcccgaatagcagtttcagggaactgcacaagccaaaaccagccggtcgcagagtccaggagcgcctgcgcaagaggacgcctgcgcaagaggacgccgtcagcttggcgtcagcgcgccgggctctggcccgccccctgtgacaccagccccgccccaccccgccccgcatacccgtgcgctgccgcgcatgctccgagccccgcccccgtgcgtcacagaatggcctcggacacccaggcagtccctgacgtgtcggggaggagccgggcgcggaggtacgctgagtggagctcggggctgcgtaggggagctgagccgagcggctgggcgggcctggccgggccggcggaggggagacgtcggttgagcggcggcgaacatgcgcttttgacacattggaggtgagcctgcagcgcggggccgctccctaaggggctgcgctgggccggcggcgccgaggcctgcccttggggagccttcccggcccggggccgtgtctgaggctccgccggggcgggccgggccgggttccggggcggccagcctgggggcaactgttccaaccgctctaactgtcccctcccttccctggtccgatgtgtggccccccaggggcgcctgcaagggaacgattccggtggcctccggaagatgtgccccgttccgggtagggtgagggctggcggtgacggaggccgggacgtggcaccgtgggctggggcgctggcggcgcaaggagtggcccagtcggaggtggcagcggcgcgcccagcccgcctcctcctaccccctcttcgaaattccttcatttgcgagggtggcttggagcggggttgcattttgatctctcagtgcctctctcccatggggggcgagagcgcgagcagcccacgttgggctcggattggcattctcctgactcccgcccggaactgctaatcatcctccccctggagttcggcaaagtgtcaccaacgggctcgggttacttgtgctcgactcttttcttgctgtaagccatgagatgaccctttaagttttgcaaaggaggtgagagttctgtcaccactgattattaccttctatttacgtagcacctttacacgtttcagagcactcttcttcctatctttttctaaccgcatcaccttgtggttgcaactgattatgttatcgccatttcgatgggtaaatggagctgggatgggggtaattatttatacttaggttcaaccaactggtgagtggtttagcttggatcataatttacatttctaggctcggagttctggtttcttttcgtgggatttttatacccttctcagctacaaaacaaggcagaaaatgtgacttgccaaagatatgccagaagctggtagattacttactcaattatttttgagaaaactcacctaggataaaaacggctgctcagtcatgagaaaaatcttcctgtgaagcttgttcaggagttgctggttaattgctttgctaaatcgtgaagttgatgggcacagtgcagcgttaagtcatgggctgaagagaagtaaagggaaaccaagtgaagtatttcttctgaattattattaaaattattgttatttaaaattagagtgcgtgagaaacaaaacctttggccagccctggttagaggttgacttgatccagatagaagttgctaaatcttctgaagctgtagttcttttgatttttttaaattaaataaattgaagttggataaagagcttaaaataagtaggaaccttagtaaaacttagatcttgctttcatgacatctgcaaaacaacttatttttgttttcattttaaaccatgctgggataaatttggttactaaagcttaaaattacttctgacgtaagtttctgagcactccataaagtaaaaaagaagtctgatagaatcaaagagagaccgtgtttatgatcaactttgaagagttaaaaattctgtaaatgtcacctttgagagtagtagaatttcagtaaaaaggcatatattgccaacagtgagttctgaaagaactcttctaacgtcagtccattttagaactgttaaccagaaacaatatcattgaaaatagattttcttaccattgtacaaagaataatttccttgtaaataaaaggcattttggacaggctgttttaaactcaaatgagttgattgttgctagatttctgaaggtcatacacagtatgataatgctttacgtaaaaattgtcatgcttttgagactgtgtccgtattgagatctggtattaaagaaagatggggtgggggcgggcagagaataataattttttttttctttgatggagtctccctctgttgcccaggctggagtgcagtggcacaatctcggctcactgcaacctccacctcctggattcaagcgattctcctgcctcagcctcctgagtagctgggattacaggtgcgcaccacgatgccctgctaatttttgtatatttagtagagacagggtttcaccatgttggtcaggctggtctcgaactcctcacctcgtgatccgcctgcctcagcctcacaaagtgctgggattacaggcgtgagccaccgtgccctgccaataatacataattatctatcttcattctagcttcagaaaattgtggatgtaccattagagcattgttttagcagtatgttttctatattagctaactttctatagcctgaatatctccagttacatagtttgaaataagtgaacacatcctcccagtgtaacttgaagcaaactgaacagactgtataacagcccctgaaactgtcgtttgagtatctgcagtggtagcaaattttattatttgtaaataatctgatttttatttttatttttttggaggcagggtctcattttgtcacccaggctggagtgcagtggagtgattacagcttactgcagcctcaacttcctggactcaagcgatcctcccaccacagtctcacgagtagctgggaccacaggtgcatgccaccacacccagctcatttttgtatttttgttagagatggggtttcagcatgttgtccaggctggccttgaagttccaggctcaactgacattcccacctcagccttccaagtgctgggattaatatgcgcgagccactgtgcctggccagaatctgatttttaaaaagagtaaatctgatgggtaaaagtagggcaatagagctggataataccagttaggaagcaataaagatgaggtgtgaccacaaagtaagaagtttttgctttgttctttttttttttttttgaaacggagtctctctctgtcacccaggctggagtggagtgcggtcgcgcgctctcggctcactgcaagttctgcctcccgggttcacgccattctcctgcctcagcctcccgagtagctgggactgcaggtgcccaccaccacgcccagctagttttttgtgtttttagtagagacggggtttcaccatgttagcaggatagtctcaatctcctgacctcgtgatccgcccgcctcggcctcccaaagtgctgggattacaggtgtgagccactgtgcccggcctttttttttttcttttatttgagatggaatctcacccttttgcccaggctggagtgcagtggccaatctcggctcactgcaacctcctcctcccgggtttgagcgattctcctgcctcagcctcctgagtagctgggattacaggtgccggccaccatacccagctaatttttttttttttttttcatattttcggtatagacgaggtttcaccatgttggccaggctggtcttgaactcctaacctcaagtgatccgcctgcctcagcctcccaaagtgctaggattataggcatgagccaccgcgcctggcctgctttgttcgcctgctttgttcttaatgtggctcataaaggctattccaaaaaagaagttttggaaatgtttttcagcaatggtgatatcactggaatatgcatatattcctgaaatgatcagttttaaagaatcatttgcatgttttaaattttgaagcctgtttactttgtggtcatacttgaaaggtctgctatcgaactaccaatttttaatagcttgatgaacatttaggtttttactatgtgccaggttctgtcctaagtactttacaaatattagctcacttcataagctcattctaatgattatccccattttacaggtgaggaaatggggcactgagtcattaagtcacttgcccaaggtcacccaagtagtgagtagatgcatcagtagcgagtctgaacttccaggtctgacttcagacttgggcagtttggcttcccggtctgggctcttaaccactatgctatgctgctcctatgacttattcttggttaaatgttttaaattgttttgatctggaagagatgatggtccttttagtaaatgatatccaacataggttataatactgttagaggggccaataagcgggttatgaaaatagcctattgattagaaaagttgtggtcaacattcaattcacatgagattcagcaagaaaataaagaatgtgaccaggcgcggtggctcatgcctgtaatcccagcactttgggaggccgaggagggcagatcacgaggtcaggagttcgagacagcctggccaacatggtgaaaccgtgtcctactaaaaatacaaaaattagccaggtatggtggtgggtgcttgtaatcccagctacttaggaggccgaggcaagagaattgcttgaacctgggagtcagaggttgcagtgaactaggattgtgccactgcactccagcctgggcaacagagtgagactccatctcaaaaaaaaaaaaaaaaaaagaatgtgtgtgaagtaaaataattttgctagaattacttgacactgaatgtaagtagttggacaaagaggatgcaagggctagaactagattctcaaaaagtttcatgcaaaaggctatttaaaaacctgagttatcaggggacactcatggaaaagttggtgttgtattaagaatatgtccctgtacaagaaccagaagtcagagacaaatggatactcgcaatacatccagaggggtaaacaatgctattcctcagggattactacttaactaggtgctcttcaaagcattaactgctagtatgtcctctgatactatataaatgggtcaaaaccaacaaaaaatacccccacatggaaatgttttgaagtggactcctgaataacatttagagattcaaaacaatcctaactcttttcgtagaagaattggccccacattcaaacaccttcaaataaatgttagatgccaaggaaggtatctaacagtcattaggaacttccataatgataccggttcatgggccacactactagcaatatcatcaaatgctgcacagtaacagaaagagtactgaaaactcaaaagaaaaatgatctgaccagtgaataaaatgttcagtacagaagcagcactaggcactcagccccagaaaggcagataggtaatctaggggcaatacaaagcataacaaaatatttaagggactgagatggctgccaaatcattataggctaaaaaggcaagaaataatcactttgggaagaccaaggctgagaggtattatcatcaaaggctacaaaaccagaggggacataaaaaaggagaatacaattttgttcgccaaatcctggaaccttccaagagagcagcacatgggactcagggcaaagctaagaccaaaaacaggaagttcatcgatggctataaagttatggaacttatcccagttgcttcaaataagataaaatcaatacattacaagttttagacttgaaatcattaacttacaaaatgctttatataaggatcaggactttcttctattgctttttttattttcctgagcttttaaatttctctttttcttagtgacagtagagtaacatgtcttcaccacaacctcaaatatatctagcttctcacttgtgctctatgctatctgttctatgggattccttatttttcttggtgtcatccgtctgaagcattctatgggcctgatggactaggcttcatcctgggacttttcattgcagccctaggttggagcccctatttcctgcatcccatgctgtccaggtcatggttttctcccttcttttgtacttgtctcaggaagtgtgtaggaggtagccctcctgacctttttttttaagtctttgtctagtaccttctgagttcttgtataagaaaaaatctcatttcctgaattgtctgtttcctctcagttcactaggtcctaaaattttcttattcatgctactgggttttcttacttgtcagatggctcttggttgtccatttatatttcagggccggataatgatgatttgaggtagctagtgtgcagtggttatctctaaggttcttcccaataaatcccatcaactccctattctttgatgtggagcctgtactgagcctatgtcagtgactgaatgtggctgcccatgtatcggattaataattttgtctaactgataatgataggttttctaatattgatttaatatatggtggtacattgtaaggtggaagtaaactacccgcacatctttttgcttactccattcctgaagtaggaattcagatgttaataaagtggtactttgaaagtcaagagggaatattgaaaggatgattataaatcagttcacatatttatttatttattttagagacagggtcttgctgtgttgcccaggctggagtgcagtggcacaatcatggctcactgcagcctcaaaatcatggcttactgcagcctcattgcttctgggctcaagcagtcctcctgcctcagcctccccatgtgttgggattacaggcatgagccaccgtgtccagcctcaattcaaatatttattgaacttccactgtgttctatgtttgatgatgtggagagatttaaccgttcattcctttaaaaagatttttttttttttttgctaaaccttcctgagtggcttgtgctagataaactccaagttctatgcatctccaggtttttatttatttactttttttttttttttttttttttagatttttagacggagtctcgctctgtcccccaggctggagtgcagtggcgcaatcttggctcactgcaagctccgcctcccgggttcacaccattctcctcccgagtaggtgggactacaggcgcctgccaccacgcccggctaattttttgtatttttagcagagatggggtttcaccgtgttagccaggatggtctcaatctcctgacctcgtgatccgcccgcctcggcctcccaaagtgctgggattacaggcatgagccaccacacctagcctattaatttacttttaaagctggtcttgagttcttgctgcctagtatggaataggttgaatcaattatggtttaattcagtaaatatcattgagtatccactattgtgcaggcattgggctgagacggaaataagtaagccagcctaacaggcaacacaaaggtgtaagcaaatgcattgccctgtggtaataatatcagtgaaagcatgtgtggggtacagaggtagcaaagaatgcaagagattttaatgctgtccagttgagggcaagaaaacctctctggaaaagatgacaattaggttttaaggataaatagtagttttcctatttaggggagccactccaggtagagaaaacctggagtagttttccatgcctgaaagagcctggtgtgttaagacagtttcgaacagtactgccagaatatagagtgggatgcctggggagggggtgctaggaagcagtaggcatgcctctagagtgggcctgacgatcagttgggagttgtaggtagccagtccaaatgttagttaattaaatcgctttttttctcctctctgaatgccttgggagagaagaaccaggatgagagagagagatcattgaagttggagattagtgggcttttggaaggaagctttggacttaaaagatgattaacaggaggtttttagagatttgataatagtaaattattgggaatgtggtgcctgattttctagtagggtcacctggcataaaatgttccaagcagatgttttgaagcagttgtatacctgggaagggcagcatgcatgcggtagcagcatctctgacaataagcttgtttctgtctcccgattcgcagaagaccacgtggccttaaaccaactgctgcaactctgtgtgcaggatgattctgtgggcccaagtcacccagcgcctatgctgcaaccaaaagtgcctcctgtcgctttgtatcaaaggacctttgtcatgatctcattcacaatattggtggtccctgagagtggagcagtggagtgattgacgtgcctgagtttgaagagagttaaccactggaatctctcatgttttattccctccaaaatgctgcagttcagtgttgtcccagattttatgcttgtgcttagatttctctgttctctaatttgttaagtttgtctttaatatttcacaggctttcttgatcatggatggtgaagatataccagatttttcaagtttaaaggaggaaactgcttattggaaggaactttccttgaagtataagcaaaggtaatgttggaaagcacactaaaagtaggggagggcatttggaatacaccgtgtcttgtttgtgcatttttctttttaacataaagctaaatttagaattgcagatttaggattctaggattgagattctacaaacagtcaccacatgggttgtatttaaatagtgtaaacatgccataagtctttatattgttcaaattattaaaatagtaggaaaactgtcatttatgatttcttctgattgttacctgttctatgctttttagtaggcggggccatctttggcccgttttgcatgcactgattctgcctcatcattttggtcatttggagattctgataagctgtctggggctccatagaacagactttacgttctcctcaggcaagcatgatcagtgtctggagccagcaaagctttgagggagggggagaagcttcaggggcatggaacgttttataaaatttcagttatttggttgggagaactttcaggcaacaaccttttaagcaacaaaacttgtctcaaatttcttttttaaaaatgggatcttgctaaataaaatattgatacattttcctattttggttaacagagtttactaagtcttatcaaaccttttactgccctttcattattatcaccgaagtcagttattctattgtgccagtggatatgaaaggtgtgtatctatggcagggttcttaatctttttctgtgtcatagatgtcttaatgggctggggtagcctgtggactcctcagcataatatttttaaatgcatagaataatagaattacaaagaaaatcaattatattgaaaaaagttatctaaatattaaactaatttatggcatagtaacatgtacttctctattaatgcattaaataaaaaaagatacagaagtgaatgtaataactacctaattttgaaatagtcatgaaaataaatatatttagagatacatgcaacgattctattgtgatgtgaaaatatgtgtgatttctgttgaatatggtagaaggaaatgccaaatttgttactttaatgaaagtaaaaatgcatttttctcgcatctgagttctgtggtggaagaagctaatggtattgagccacgtagccttacttttcataaatattgtaatcactgacttgtggctcctttttgggcttgtcgttttcattgaaccctgaatatatacagtaagagatgcaaaacagattgtctttagtatattttatgagagcattagcattcaagcaaaaattatcgaattgctctataatcacctccaagacaatccttgtggttcttagtgtaactcgtctttcccactttgtttctgattagcttccaggaagctcgggatgagctagttgaattccaggaaggaagcagagaattagaagcagagttggaggcacaattagtacaggctgaacaaagaaatagagacttgcaggctgataaccaaagactgaaatatgaagtggaggcattaaaggtaattgcagcagtagacgctggggtctaatgtgttgagttttattaaaatgagaaatatgtttttcaggtgcttaagagcagctggcgacaaaaaatagtttgaaaaaaacgcttaaagtgaatttttgaataaaatgttttctttcacggaaccaggggaaaaggtggtttagagtttaggagttcacttagaaactttgtagttgtcacttttctagctataatgttcctagctatattatattatagttcctataattttcaaaagctgcctgattatttgttttgacagataggttgcctcattctgcagtatgtttacaattatattgatagggaatatgcatttatttcattattgttcatagccctttcagttttggagtttagttagggttaaaaatttcccttctaaaaaggaattttcaggagcaaaaggattcacccctttctctgccctttaccatctactgtagccacatgcttgagggtatttagtgtctggggagtgggtgggttctgggaaggttggatgggcaggtgaaaggtagggaatgtgaactctgtgcttaccctgggccgcatttagcctgaaaatccagaggtttccttaacaagtttgcggattttgaggcaaggattttttatattagttcttttcagagagattgttattgggtttctttctgagaggagaatggttgacaaaatttaacatgagtttaggcacttagaatgaatgtgtcatttagttgtttttaaagtaattgttacaagagtgtgggtaaattccttgggttcccccccacccttttaacttgagttacctctttagtaaagagaactgtatattaatgacatgtactttcctatactgatgccctcaggagaagctagagcatcaatatgcacagagctataagcaggtctcagtgttagaagatgatttaagtcagactcgggccattaaggagcagttgcataagtatgtgagagagctggagcaggccaacgacgacctggagcgagccaaaaggtaaacgaatgactgcattttgttagaaaaaaaccaccttggtaattagtgattaaaatctttattaggctcttcccctagatcttagtcccagaacatttcctgttggtgtttcatgtcacctgtaactcatcggacggaagggaaccccaaatcctcatctcccagataacgcccttcaaagctttctctttcaatttttcttttttccttctttcatatactgtggttgatcctattggttttgttttgttttttgagacagggtctcacattgtcgcccagtctggagtgcagtggcatgatctcggctcactgcaacctctgcctcccagattcaagcgattcttgtgcctcagccttccaagtagctgggattataggcatgtgccaccacacccagctaatttttgtatttttagtagagacggggttttgccatgttggccaggctggtcttgaattcctgccatcaagtgatctgcccaccttggcctcccaaagtgctgggattataggcatgagccactgcacccagcctaggttttgtgtatttatttattttttaaactgtctcatgcattcccccatcttccctctgtgctcttaacacttccatacttcctgtaggtcctcatatcttatacctggattctgtagttatcctctagctgatatatctttatatttctgttcctttttattctcttttaatactgactgatgaattttcttaaaatgttgatttcagttcaaatttctgaacaacgtgcagtggcttgctatcactgttgccaaacttttatgcatgtgtaattagttgtttcttaaccattccaaacttaattcctattactttataattgtttcctggtatttccttccttaatatttatccagtgagtcttaagtgactgacatgatgctaaacttacagatgcggagctagtctggtcactacccttgggggtgacagatatgtacattcactatgttaataccctagtaaaaaaaagtgggcaagctgctgctccagggcatagaggaggcagcagccagattggttgcggggaggtgggcggggggggggcagtgggggaaccaatcagaggctgaagtgaagttacaaagtgacaccctatgcaaatgtctgagtggttgcagaaagcaaagggaatagcttctggtccttttcttacttaggtgtggaaagttccggttttccttttgatttagttctaggaagtcagtgtgaattggccttaggttccctgacttgggacttaatgttttaaacaaactcttacatatattacaagttttgaaaagttttctttctgaaaatgtgtaaacttgattgtattgtgttcaaaacacagtggagatataaatagtgtaacaaatagcctttctgtagggaacattaaggaatagatgggaatttaaaagaatgtattgtatatattgcccaactgatagagacactacgtgccagcagtggtcaggaaggggcaagatcatcttctttgattggggccaggctggctaggtcaggaaatgtcacgagataaactgacagtttccttttgtactatctgtttgcacatgttatttatttaattcatgtactctaatttttctttttagggcaacaatagtttcactggaagactttgaacaaaggctaaaccaggccattgaacgaaatgcatttttagaaagtgaacttgatgaaaaggaatctttgttggtctctgtacagaggttaaaggatgaagcaagaggtaaaatttataacttaaagaatacagttgacccttgaacaacatgggtttgaattgtgtgggcccacttatactctgattttttttcaaccaaatgtggattgaaaatacagtattcacggcattcaaaaccctgtatatggagggctgacttttcatatatacgggctgactgtgggacttcagtatgcgccaattttggtgtaggtgggggtcctggaaccaatccccatgtatactgagggacaactgtatttatcctcccttaccttactgtccctatgccagaagaagcttagagtcaactttttttggagacgaagtctcgtactttcacccaggctggagtgcaatggcacaatctcagctcactgcaaattccgcctcctgggttcaaacaattctcctgcctcagcctctcgagtagctgggattacaggcgcccgccaccacacccagctgatttttgtatttttagtagagacgggatttcaccatattggccaggctgatctcgaactcctgacctcgtgatccggccgccttggcctcccaaaatgctgggattacagacgtgagccaccgcgcctggccccatccagctaattaagaaaacattttttttgtggagacagtctcagtatgttggccaggctggttttgaacccttggccttaaatggtccttctggttctgtctcccaaaatgttgggattatgggtgtgagccactgtgcctggcttcttaatcattttaaagtgtacagtccagtagtgttaagtatagtcaaattgttgtgtaaacaaatttttagaactttttcatcttgcaaaactgaaactatacctattgaatagtgactacccattttcccttcccttcagcccctggcaaccacagttctattttctatgagttcagctactttagatacctcatataagggagattatacagtatttgtgactggtttattgcatttagcataatgtcctcaaggtttatccatgtgtagtatgtgacaaaatttccttcttttttaaggctgaatgatactccattgtatgtattcattttctttatctgttcatctgtggatggacatcgagttgctcccatctcttgctattgcgaatgataccgctgtgaacatgggtgtccaaatatctctttgagatcctgttttgaattcttttggatacatacccaaaagggggatgactttgttccttttttaacacaagcaaatattctgtaagttaaattgcataattggaaaagataacattaattttgggttaaaaactcgacattggctgggtgtggcggctcacgcctgtaattctagcactttgggaggctgaggcgggtggatcatttgaggttaggagttcgagaccagcctgaccaacatggtgaaaccccatctctactaaaaattcaaaaaaaaaaattagctgggtgtggtggcgggcacctgtaatcccagctacttgggaggctgaggcaggagaatcgcttgaacccaggaggtggaggttgcagtgagccgagattgcgtcactgcactctagcctgggcgacagagtgagactccgtctcaaaaaaaaaaaaaaacgctcaatatttgaaagcatgagaaaaatttaaaccgttctgaatacttcttttctaaaagtaaatatttcatagtgataatagttaatgccagcccatttaaaattacaaaaatgcacttagttgattttgcaataaccccaaaactacatcatttgaaaataaaagcaaataagttggtgaagaatatttacttttgtgtgaattgtactgtggactctgcactgtttctttttgcatataagcataagtaacttctctcaggttatagcatttttaaattctaaaagatcatttagacagtagttttgccatttttattcccctagaaatgaaagttatacttaaataggaaattcatttttgagaaatagtaatttaggaagaagacctttatgacattttagatgtcactttgcttgatatatttgctccctctagtgagtattcctgcccttgtttgcaatattttacagatttaaggcaagaactagcagttcgggaaagacaacaggaagtaactagaaagtcggctcctagctctccaactctagactgtgaaaagatggactccgccgtccaagcatcactttctttgccagctacccctgttggcaaaggaacggagaacacttttccttcaccgaaaggtttgtaatgtcttttctttttgaggcgatgtgttagatgatcagcttacgggggtttgttgctgaaggcggttgctaaggtttaaagagtaattttagtttaaaagttggtgaagtctagtgctatgtgaaatagaagaaggaattgttttcctaggccactaatatataggaaacagtgaaatgatggttacatttaagatgagatttttaaaagttaaaggtttttaaggaaagtttattttttgatgatagcaatagattttgtgattacagccgtatgtttaggtagaaaattttaaaaacacagaaaaagaaaataaaaatcatgttatcttaccacttacaggcacccaccattaacattttgagtttttttttctattgtgtgcttgtgtgtgtttgtgcacatctctttgtcacatgcaaatttggggatcatatttaaacacagttttatttcttccttttgccactttccatatcatgggagacctgaggcctttctacatagaatgtacagagaatcattaagttatctttcagactcatgtaagaccggcttggatggacatgcccattctgttacatgcttcaggagctgccattttcaaaagcattgttcggagtaattgatgattggcacatacagaatactcacattgccatgaaccagtgtgtttttttaaaatccggataagcagaaaaaccacctagtagccactagatagaaccttaaaatggaatcttaaagctctcaattgagatttgtttagattttgcagctcgtagttcatatttctgctactctcatccccccttgctttttttttccaccctatattgaagctgtcatcccaccctttttaaaatatagggttttatcttttagaatgctatgtgggcaactagtacagtgagctctctctgtctgtgctactcaatagtcaccagcccatgtggctatttaaatttatattaaaatgaaataaaatataaaattcagtttctttgtcacattaaccacatttcaagtgctcagtaacccttgagtaggtaattcaacttgtctttgccttgttacgagatgatatcagataaggtatgtgaaggtgctgtatggttgtaaggtgttactaattgcgctaggtttactgctgaggacaaagggcaggcaatagattattagcagtcatcaggagccctcacggtcagtttttcagaagagctgcttgtatatttgaagatttcacaattacacctgaggactaacaaagttttacttttatgttactgattagaattatgcagatctgaaaatcctttaattgaagacgaatcagaatagtgaaaagcctcaggtgcggtgacacccacaggtggtgcacatttttttttaatagcccgttagagttttcattcagggacttggggagtcaaaaggacatggagcctgctgtggcacggcatgaggtgtgccaaccctatggcagtaatatttgcttaatagatatgtttttaggctggaaccaatagcatgaattttcactggctaacctaaaagctgctgtgtactagatcactgcaatttcattacaagaaagcacagagttgtgagcagcagcaggtggtcagagaaatcggtaagatcttagagctgatctttctgaagtggtctgtctttaattgtattttaccttttacaatgtttgtttctctttctttctttctttctctttctttctttttctttcttcctttctttcttttcttttctttttcttctcttttttttttttttttttgacagagttttgctttttttgcccaggctagagtgcaatggtgcgatcttggctcattgcaacttccgcctcctgggttcaagtgattctcctgccttggcctcccaagtagctgggattacaggtgtgtgccaccacacccagctaattttgtatttttagtagaaatggggtttcaccatgttggtcaggccagtctcaaactcctgacctcaggtgatccacccacctcagcctcccaaagtgctgagagtacaggcatgagccaccatgcccagcctacaatgtttgtttctaaaaagcatttaaagcaacttaccataaaagcacagatttaataacacctaaaatgtaaaacttgaatagggaaaaatgagatctagaaatccctgccaagaacagtacagcggttttttatatcacgttgagcgcctgttatgtgtcatgtgttattctggatgctgggagcacagtggtaagacaaagcccctaccttcaatgagattatattcttgaggagaagaaggataataaacaacaaaaaagccacacaagtattttcgttgctgattagcactctgtggaaaacaaacataaaaaataatagctaacctttattgagtacttactacgtgcatttttaaagtacattaatttaaacttcacaacatctttatgatgaggtagttgttatttgccccctcttacatatgggtcacttacccagtggctgaactggatttgaatacagtagttcagctcaagagccgttaatcatgatgtcatattatctcttaaaaattaagaaatgtgcacgactgaaaaccttactgagtgtggaagaagatatgggtaaatatcatggtaaatactatgattctgaatgggaagacttaattttcttacaatatccattctccccaagtcaatctgtaatttcaacttctaataaaaatcctaataggatttaaaaaattgatatgttgatattaaaattattttggaatagtaaatgtgcaagaacagctgagaaaaatttgaaatgggctaataacaagagggatctttgccttttgagatctcaaaatatattttaacattataataaagtagcatacttctgatagaataggctaatagttcaatggaactgaaatatattcatatatttagggaatttagtttatagttatagtgctatttcagatgagatgagttttccctaaatgatactaggacaattggctctccatttggaggaaaaaatttagatatgtatcttatagacaactataatttctaggtgaattaaatgatctaaatgtaaaaaaatcagaaaaatactaggagaaagtatgggaaacattatgacattaagatggaaaagccaaaggttctcctaccgaaacacagtgtttacaagatgaatgtcacgctgagagatagaacatctataagagaaagggtgaacatccagaatgtatagagttcttacaaattgattacaggaaagacaaaccagtagagaaatgtacaaagactaaacagctgattttcagaagagattcaaatgactagttactatggaaatagaaactaaaaaacgtgactatcaaattgtcaaaaaaaaaaaagataatatctaatattatcaagggcaccaccgcatagattgctgatattagcacaggctttttagagagcattttggcagtgtctgttaaggtgaaaaaaatgggcatatgttctgacccagcagttctatttttaggaatctcttttccagaaatacttgtctagatgtttaagagtatatgtccttgtagcattacttataatggcgaaaaatttgatataatgtaaatatccaccaattggacagtggtttagcctatttatggtatctatactttatccatagtttgaagtagtttgttgatattgtattgagtgttacactactttgtaacatcaacaacaaaacccaaatgtaaagggaactgcaagtgtaatcactcagcttttatttttctctagctataccaaatggttttggtaccagtccactaactccctctgctaggatatcagcactaaacatcgtgggggatctcttacggaaagtaggggtaagtttcaattatttatcactaggtgtttccactgacaaggtattgaattatttcttaatttgaagtgagggaagaaagaaaggatactttcctgtggtaaaggctgtcatgaagctcagaagcaaaagcatccattgactagccaagtccagatgacacttcatgatgcccctgcagaagagcctgtaccttgaactctgaggttcccaccggggcattcttcctgttccccactcctgtttcaacagcacgatgcctctgtccttgtctagaatactttgtctaaggcctgctgtgtgtcttctaccaccctcatcctggtctttgctgctgtctaccgtcttcctggtcattcctttgttttgtgtttgtgggactttaacatttggctcatggcattactctctacttttagtcttgcccaccttatttccttggccacctcaacttcagtgccttctccttggtgtgagccttgtattccagaacagtttcgcttctgaaatattaaacccagccggacgcggtggctcacgcctgtaatcccagcactttgggaggctgaggcgggtggatcacctgaggtcaggagttcaagaccagcctggccaacatggtgaaaccctgtctctactaaaaatacaaaaattagtcggcatggtggcagatgcctgtaatcccagctacttgggaggctgaggcaagagaatcacttgaacccaggaggcggaggttgcagtgagccgagatcgagccactgcactccagcctgggcaacagacagcaagactccatctcaaaaaaaaaaaaaaaaaaaaaattaaacccgtttttctgcttaatcagtgtgttactgtgtaccatacctactctttaacctcatcaagagtattaccccattttttagtgtgtttgtttttatcagccatctcttgctttcacttcctttctattcatctgtgatctcacacatctcttactctgtcactgttgacttcatggtctctctggccacaaaggagatctgcagtctgaattactggaaacagttgcagaaccatgtggatttatgccactatcaagtcagcatttctagcattagctcccattactatttcccttagtgagttttacctctcctttcagtaatcaaccattgccatttcccactatctactacccccttcacttattttcgtgtgtgacactttctaaaaaatgtagaaattgcattatactttatctaaagcagatatgggaggccaagacacaggtcctatgtttgcctgtttcagctcatcataggggttattttctaaccatcagattaaacctgcatttttaaggttaaaatacaaagtaaagtgcacaggtcgttcctacagtacatagagtaatctttcttcactcccaagataaccattttaaaatcctctatgttggagtatttgtctttataacttgaaatcatgtgcttatttttctgtttatcttgatttactcaactttaagcaaagatatttttatttttattttttgttcttttaaaaaaattactttaacattcttgaacttttgtttctgaatgtattaggttatatctttttttttttttttttttttttgagaacggagtctcgctttgttgccaaggctggagtgcagcggcacgatctcagctcactgcaacctctgcctcccaggttcaagcgattctcctgcatcagcctcctgagtagctgggattacaggcacatgccaccacacctggctaatttttgtatttttagtagagacggggtttcaccatgttggccatgctggtcttgaacgcctgacttcaggtgatctgcctgccttggcctgccaaagtgctgggattacaggcatgagccaccatgtctggccagtattagactatatcttaactcgctgttctctccctttcttccccaccacactcccactccgctttccttttctgagccctctactagctgtgtgagctctctgttggttggttctaaaaatggaaaagtagtcaaacagcatttgtaacaatgcacatatatgtgttatttactgtgtaatcacagaggagatgctggactttcagatgggtctttatatttgtgccattcaacaaatgtgttttgagaattttgttctttaactgtaatttactcaaaatcatactgggtttttaaatatttcgtattgtagctgactgtacgctgctttcttttcctagcatttctgtttccccttctttcttttgagtagaagaaacctacacctttctttgctctcggatcttctagcttcttcttcacactctttgtgggatgccctgatgggcttcgagggctgctgcattgttgtcgccctcgaatttctctccattttactcttgggttagttctgcctgttcctcaccccacgttgttgtctgtctttgttccttgtttgttttgctttagtactttaatttattcagaagtggtgcatgaaagtttaatttggcatccttgtatggtttacacattcagctgacaatccgtcttctaagagttatcaaaataacgacctccaaaagtcatcaacactttgggtctgctggtgtccaccagcccttgttggcttttatgaatatttcatttatgcctctttacacgactttgtccactgacttgaactggaagcccttctccactcttgcatgccttcacagagaaaatcaaggccatttgttttaagcttctttgatttcttttctcatcttttgttattactctcctattattacctctatttgtagccattcctcctttttgtcccagtggtaaaagtgcaaattcctgtccgtggctaattttgtccatctgtgctttggatctcatttcttccaacccttaaatctttatttctcctgtatttcagccttttactatatatgcgttaatatttatgtataatgtttatgtattacacattatatgttatgtgttatacaggtatactttgatatttctgtattacatgttatccatataaatatatgtaatacttatgtggtacatattacatactttaaagcttcttgaaagcgtgtccccatttattgttagcattttgactgcatgcacacgccccagacactttagcctgggctctgtcccctgcttatgccgctaaaactgctcactggtgatctcagtgctgtcaaatcctgtggatgccgttctgtcctaattttacttgaagcattcaacactgaccgttttttttttttaatgccctcttttctctccttctctgatgctgtttcatggctgctcccaactttctttccattcctcttagtcatcttgttgggtcttcatctgctcaccctttcgatattggttttactcagagttctgtccttgattttctgatcttaatcacagccatagtttcatccacccctgggtgtggatgtctttcaaatcttaatctctagaccaccctttcccccctcaaaagacctggtgctcgtgcttggatgtctcactgatgtctcagacataagttgtgcctgccgtgtgatagatactcaatatggatttgaatgaatgcgtgtcttgaatataggaattgaatggctctcaatttctactgtgtgtgtgtgtgtgtgtgtagctttaataagctgctgaattattgctgaattatgcttattcagagtttgttttacaaggtcattacctctcttccttttttctgttgtcattttagtaggtcattgtacttttgtcataggaaagaaggagaagaaaaaagtttgtctgtttttgttgctgtttcttttttttgagacagagtctcactctgtcgcccaggctgtagtgcagtggtgctatcaaggctcacagcaatctctgcttcctgggttccagtgattcttgtgccttagcctcctgcgtagctgggattacaggtgcatgccaccacacccagctaatttttttattttttctttagtagagacagggttttaccatcttggccaggctggtctcgaactcatggcctcaagtgatccacctgccttggcctcctaaagtgctgggattacaggaatgagccactgcacccaaccattgttgctgtttctgaatagctgttattgaaatgtggggggaggaggtccaaatggattctcaaagtgaagtatatgttacctgtggatttaatttagctgtgcattcccagtcctttactgtcatggataatagacatgaattgtgtatatatatattttgccatggatagtatttttcttttcggagaaggaggggtttgatttgggcaaagtgtttatgggaaagagacagctggtgaagtgtgagtgtgtggaaatacatgagaaacgcctgatctctccatgtcatctgcgttggtagagccctgtgcttgccaggtgttgtggtgacaggtgcaaaacaagggtgcccaatttagaggtaaatgctaaaaggccagtgtcatttgcgggtgaattatttaattacagacaaagggtatcagttaaacattttacagagtgctgtcagaaataaaatagcttttaatttcatgtaaagtgttgtaaatgttctcatccattctcatgcagtagaaaaaatgaagaacctagagaaagaattggctgccgtaaaaaaaattctcaagtgatatttttgggttttttaatagtgcttgctcccaaaacacaccctgccccccaacaccaactaacagtctacagcttagaaacgagcaatggatagggtcaagagacctgggatctgctgttccacctcctgtaccacactttttttagttgtaaggggaagattatatgtatttccttcagtaacgctaagaggaggaaacaaaatattctgaggtcattagaaagggagcataagtattccccctttttattagaaagttgattgattatggctgaactaaccaccattatcaactgagatgagtaagttttgaggcttgaaatagaaatggtttgaaatgcaaatttttatgtgcagctactgttttgacaaccatatcattcctccttcttttttgtaggctttagaatccaaattagcagcttgcaggaattttgcaaaggaccaagcatcacgaaaatcctatatttcagggaatgttaactgtggggtgctgaatggcaatggcacaaagttctctcgatcagggcatacatctttcttcgacaaagggtaagtcctgaatgttttaagtgataattttttgagtagtaaagtgacaggttagtaagtgagcataatgaagccttgaaaaggtaaactcagcttgacaaaccttcccgaagcctgttatcattctaatcttaggtgacatgacgtctgttgttgtcctctagtccccatggagtctgttgccccaggaaccctgaatctgaggcttctgtcctgggaagcagactcttgaaaggcagcagtgtgaggctctggtgagtcaaaatgactgcgataaggtccctgttctccaggtgcttacaggctggcagacttggaaatatttttttggggtagaagacagcatcacaattaaatatatgcaaactctacaacagacatcccctgtgagaattttagagaaatataaagccctgaagtacttaggcactggatcaaatacagtttaggagatacaacttttgtataaagttaaggcttttttgaagattgaaataaaattgttttaaggttgaagcatccttaatgcaaaaaatttcagttagtatggaagtatatgaactaaaaagtcatggtttcctgccttcacactgtttctgcattccttacagttattccaaggcatgccaaatcatatttttatgcatctgctctaagttgtttgtaacacagttacgggattatactttaaatattgctttgcagtgtgcctatcatgacttctattgccattatctttccatgtcatgtatattattctacctcaatttacttatttatttttaaatactacatggtaatacgtggttgtatgagtatgccttaatataggtcactattaggacccgtggcctgggatgctcacggtgttgcctaaggtagttgttattgaaacagccaacaggcacccgtgatccttggctactgtctctgctttgagtcaaagaggtaattcttgcttgtttttctctgaaagcagagcaggtacaactctagaaacgctcacaatctctgaaagcagctgggattttctgccgtcctcaataattatggcacatgtgtaaaggagcagattcgacacacggtgcactctgaataggctcttatccttgcagtggagtgttttggttgatctctgtccctgattttaccctggagaatatacatttcattaaggattttgtattaaaagcacatcctaaaacatcactatacaaattagaactttattctttcttaaaaaatttgtttaaataatttttgttttcttttgaagagatgggggtctcactctgttgcctaggctgatctcaaactcctgggctcaagtgatcctcctgcctcagcctcccaaagtgctgggcttgccgccgcgcccagctgaaatcagaactttattctaaccattgggtttcctcgggtggagtaaacataaaattgattttcctcaggcttaggagtttcaggcagacttgcggcagcccttgtttttatagtggaatgataaatggaatgactggatggttttacatgagcgtagccatttcccctgaatgatatggagaacttttagggtagtcttcataaatgttggaagcagtgcctaattatttttccctacaacttataatgatcctctactagagtagttattagtttctccttggaatcgtatttcttgatgggccgcaggtgcctttcatgagagcaggtgtgaatcataaatggataggtcggacaggtgcctgtgcgtgtggaagccctgaagaacagtcacgaggagggaaggataacactgtctgttcagggtcgctactcctgcccgccacttgcctcccaagacagagcaccagggcagggattgccaagaggtgagcctgttctgagggagatgtggggaccttagggtgagctgaagccaggaacaggccttgggcacactgactgcacctctgccccttgagagcatccgagatgtaagtgtaggctttacttcctgagctgaacccggaaatgtgctgtgcttcccaatcggaacagttgcagatactgagttttggttttaaatggtagacattttacattgtgccttttctattaagaaatatgcttttgtgggctggctgttgtgtgagtgtttagcttatatgataagtggattgtgtatgcgcactgaaatattaacctactgttgctggagttgtctttctagttgctgtattcctgaggataactcttttgtgggttttgctgtgttttcactttcttgccgctttgcttcgattccggcttttggcctgtctggctttttacctctggcttttcttctgccaacctgttgaccagataaaaaccaagatgttgtgtagcagccgcaaaaggaagggcaggatattccacttcccaggtccattatacactctggcaggttaaaaacacaaaagcctgtctgtgtagaagtggagaagtatggcttgtagtttcagcatgagaaaagtgccccatttgaaaaagccctccactgcagaacctgcctgccctccctctcactcctgaggagtctgtagcaccgtggtgatggctcactagtgctgccagaaacctgcggcaggattgtttgggggagagacatcatcaaagtaggtttgtgtgtgtgtgcatgtgtgcgggtgtacatgtgttcaccttcccacccgctgaaacttcagatgcagtgaagccttctcacataaaacaatataccttaactgggcgtattgctctgtgggattcaaaagtattttgtaaattctggtcacttgagggcttcttggaatcaggtttttgtctagtctgtgagcacttctgccagttcctgaaacatgggctgccgtgcctgcttcccaggtgccgagctgtttccttcaaccatggtcaccctttgtctcaccatctgaaaggacacacatttcatgtggagtgtggtcgcttggagtctctcaaaaacactcttttttttcccataactttatgtagtttcttaggtaacatgtgctctatttttgtaagccactctgagttcttttgggctgtgtgtaggtgggcatggactaattttagggcgtgatgtggaaatagtattcgtattactgtttaatatgttctcctttcttttattaggcaagaaaaagtcatatttcccacgttgttcatgggtaactgaatttgtttgctgtgctctttttcattctttcttaatcctggtgtgtggtggaagacacattaacaatctggttttactaactgcatggggctgactcagctttaaccaacttacagcccatcagtgaactttcacggtcctgttcgacttgactgtatgccgttattagttcagctgtgagaaacaagaacaaattagttgcagtggtcctggggtggctgggagtagcatgccaggtggcacgcctgagatgggctagggcgctgtagtgttgatttcagagtctggcgatgggggtttgaggtcactgtcaggccctgggatcacctttgactgtcttcctgggactgggggtcttcccgttacccagttgcttctgttttctcaagtcaggcaccagtgtgagcattccctcacctctgcgctcacgcatggagtccccagttaaaatggaatggtacatggggacgtgtgtaagatctgccttacatttcagaactgctttgcagtttgcagagcctgggctgagaactggagcaggctggagctgctctgagcccacactcatccactgaaataggagactcaggtgtggcgtgtgcctgcctgcaggctcttctggatagcttgagcccaccctcctgccctctccagtgtcctgatccttgctgctttgacagagttaatgtttccatccttcatctcagctgctttggatttattgtcctgagtagcttctaagtgtgccttggctcttcccccttttcacttcttccactgacattttacaactgaccttagcactttttcttagctggattctctatatttcagcctccttaactagtctgtggtggtaagatcatgaaattttatagctctggaaccttttttttacatatatgattcccagatctgtatcttcaagcctgccccatcactcttccttcagtcctgtcttgtgcactgggacattgccctgtggctctttgctgctccctgaaactgaatctgttgaatatagagtctcttctcttgcaaatcttttccccatgcacagctttgcaggcctctgaaggacttcactagacctgtcatcccatctagaaggccagctttcttctctctctgttctttaactttctactttttgagtcaggagagaggcgctaggtgagaccctggtggattgatgttccctctctactccacccaccttcacattaagcgttccatttctgcccatgtagaaatttaccggttctctctttatagtctgggctgcaccacttacttttcccattagagccggcctgcattggagtgccgaagtggttgcttctgagggctgctaggtggcctctgaccaggaggagactagaaaagggtcctggcctgggcatctggaggcagctgtggccccgacttccccatcagtggctcactaggtgagcctaggctaatggctggaccttctcttgctttggttgtcttggcagtggaacagtgggatgaacctgttgttccttacggtgcacttgaaaatgccagaatcccatcctcaacctgcttgaggagccatctcctagttgctgcttttgtacacccccgtggcccaggtgccagattcttcttggcatccaatggtgctccctttctgctgggttccgggcactgtctgcagtacaggtttaggggcttgcctgccactgtgatgtgtgaggccaggaatctgaggttcacacgtgctgagagctgcaggcatttgtggggcctgcctggttgtccctgaggtttctaggagaagcaggtgtcagggactctgggactagccagacagatggagcctattatatgagggctaccgtggcaaataggatatggccttggccccagaagaggcacaggcctgtgaccttgggagagtgggaaggatgatttcaaacttgcaaatgtgttgaagctcaaaaatcagacctaacccagtgaggaaagagacaatctggctgtttgtcgtcgaagtaggacagtgtgcaacagggagaaatgacatttgtcagagcctttctcctggggctcttggtctctgtatgcgtggttggaatttaaactccacatatgtactctgagtttagtttctttagacatgaactttgtttcttccaagtaggcagggactatttgtcaagtctctgcatgcctgtttgtctgtgaggttatcctcaccccgtcagtgtacgaaacagctgtctctgcagggagtgtgtgtcggcattttttttttttaaggagaacctctctccatgagtctgtatttagctccctggagccgtctgatgagtaggtgggggcagtagtgggcaggtgtggtgcagtgtggccccttgtcgtagttggctttatctcccaaattgctagtgggacaaattttcctaggaagcgtttcaaggtggaaaggctgaagtggctcctgagagaggttccaggctgcacactccctccccctcttgctgcttcctgtggctgcgctgcatggtgcgtgagggggatgcttggggggctccctgcatcgctgggctctgggtgcgtgatggggacgctggggggctccctgtgtcgctgggctccgggtgctgggtcctggctgcaggctattgggttgggctgggctgtctgcacacgagtctgcgttgaaaagcctactcatctggcgttgcttgctaaacaatttttaaaaggttatttttctccaccttattaagatattcgtgtattaatacattatatttggaaaatgtaaggagatttggaaaatgattaaaaaaggataaagtagtaaacaaaattcacccacagcccagagggaagaaaagtaacgattcttaaattttctttttatgatatatatgatcctatgtacatatatgttggtgtgtgtatatatatatgtgtatgcgtatatataatgtatgtatatatacatttatttatacacactccccctctgtccctgctttgtggatttagctgcatggatagtaatgtctatctaaggggctatagtctagaatctagaatatatactatttgcttttttttctttcatatcattgaatctacagagtttggtaacctgcatctttttccacttagtgttagttacattctgaatattttcccatgctattaaaaaacttgtggaatgtgtttttaatggctgtgcaatatcttattgttcagttgtaccattatttatttaactagttccctattgccaggcatttagacctgctttatggggaaagaatcaggactgtggcttccgtggccagtgtgcggcagttgccaaacaggtcatgtggtcctggttccccaggattcccaaaggctcaattctctaaccagctggtgctttccaggcagccagtgccccttgggccatcaggaccctacagcctgcgaggaatagttttagaaagcagattaatttcctattgtgtgtgagtgattttaaatgagtttttcgtttcccctttcttcccttctgtgctctggttgctcccacagggcagtaaacggctttgaccccgctcctcctcctcctggtctgggctcctcgcgtccatcgtcagcgccgggtatgctgcctctcagtgtgtgagtgcctagcctccaggtgggggctcctgccctcctccaacaacccaggacacccacgcctcacccctcggtgcctgggcccagccccgtgcccctccgtctgcctccgcacggctggcagagggcaggctgcatgcagtggcggctactgggccctgcccagccccggaactctgcgcgatatcaatactggctattttctcttctcgccgtagtgccgttggtttcacatgattgcacttttgtgggtcgcaaggtgatacatacgtgtattacttggtcactggatgcagaagtacccattcatcacacctgccccatagcccccactctgctgtactgataggatttagttgtgttttaggacattgcaaatcttctagaagttctcccccaaatcaggtcaatgtgtgccctcctgagctcccacccaggcatctccagtgctcatgatcatgtgtcccccaactccacccctcacagtttgggcctgtttctggcaaagagtcaggaaggttactgaattagggaacattttctgcaccttctgattttacttaagcagctaccattccatggacttgcctcccagagcagcacaatgcccgtctgagccccacgtggcaggagcctctgggacggggcacacacaggcccagcctctgtgctgtctcctcctccgtgcgcctcagactcggggtgagggaggcgggcagcctctcgccagccttcccgtccttcagttcaacgacatctttggagtgtttttgttttctcttccaagggccgtcccgttgtgttaggaagggtgagtggctggttccagggtgggccggtgccagctccggggtggactgaacagcggcggctgtccctgtgcatcctttgattactctcatgctgcatttactgtttacatttgttttattgtacataggtttgtaaacattattgcctgagatatttgtatataacttgggctttgtagcttttatttattcagaacgcatacggcatgttaatgactctgatggtgtcctcctctgggcagctgtataggatcatcatgtggttacaaaaaatacttccctcaaaaaaattcttttaatgtggaaacaataaatttcacagaaaaaaaggattgacgttgctttattcagtctctgccatcccatgagaggagagctggggcccgtaaagccaggttccaacgtcactgctgctctgacatgggacacgcagctgtggaatgggacagagatcaggtggcctccggagatgtcttatgtgcggagcaggcgtcctcatgctgtttcttggcactggcttctgggcttggctgtgatttccaggagcagtttgagaatggcctgggccccatgtgaaaatctgaaaggaaggaccaggatgttgagggcggaagttcacaaagtcccagagtaactgggatggatccgggacctggtcctgcagctgtgctgccattcatgacagatgttgtcattctgggattagaagtcgcttcgaaccggcacttctcctcatccctcaggttaatgctagcaagtgagagaaggtgtcagatacttgatagcaagacacattgaagaacgcgtaaactgggggtctgtgtgaatgcatcagattctgagcactgtttgcttagaacaacagaaacattttatagttttaaaactgtaagtaactgaaaacgatgtgaatcaaaaccctaagagacttcgggaggccgaggtgggcggatcacaaggtcaggagttcgagaccagcctgaccaacatggtgaaaccctgtctctactaaaaatacaaaaattggccaggcatggtggcgggtgcctgtagtcccagctacttgggaggctgaggcaggagaatcgcttgaacctgggaggtggaggttgcagtgaactgagatcatgtcactgcactccagcctgggtgacagagctagactctgtctcaagaaaacccacaaaaaccctgagtgaataagaactattaagtaggatccattgtcaaacatttctctattaatctatagacaggaatatctgctgttagttcctggagattttgtcctgagctgagtctccagggacactcgcggtgggtgtgtgctgtgcttggctgagctgcagtgcttgagaggacaatcctaagccccttgttgatgtgcagcaacttcatcttctttcccagccctcattggaaggattggattagatgagaggtttcagcatttagccgacctctttatgtaggaaccccaactaaaacacagcaagcagggctttcactctggttaaagcacagttgatgtttggagccctgaatcttcatccctggctccccaaatgatttctcacttcctttgcatctgaacaccctgggctcctcttatccagactgttctgccaattgctggtcactcagttgatagctggaggaagggccctggctacaggggcccacgtgtcatccactgcatgtcaccactgctgtgggtccagaagagcctgggctaggtccctggaggggtagcagcgtgctgttgggcttatttctgatccctttgggaagagactttcactttaaaattaaaaaaatttttgtcctagccagtctaatttagcagtggggggttatataccaactttagtgacttttttttttttttttgagatggagtctcgctctgtcgcccaggctggagtgcagtggcgtgatcttggctcactgtaacctccacctcccgggttccagcgattctcctgactcagcctcctaagcagctggcgcccgccgccatgcctggctaattttttttttttttttttgtatttttagtagaggcagggtttcaccatgttgttcaggctggtcttgaactcttgacctcaggtaatccacccgcctcggcctcccaaagttctgggattacaggtgtgggccaccgtggctggccttagtgacgttttttttgtggctctagcagctcttggcaaatgatcccccgtgaagaaagcagccaactccctggctcatctcccgctttctgtttggactgtggggtgtaagatgctactttggacatggtcagagagagcatctgccacctggcatgaatgccgctacgtaccgtttgcctgtctagctgaagagtgcctctgggtagagtgcctctgtgtgggttttcttcctggagctgccgggtacctggttttgcatggctctccatgaaacctcgggaatgagccttccttgagccgcatctgtgtgccgttcctccctgctggtggggctgatctcccgggtggtggacagcttcttgcctccaggtgttttcatttcagccgctcagtcctatcccttgctcccaaatattgtcttacaagagagtagtagccagcgctccacttccttcagcccagagtggccagaaatgatccctgaccaacgcagctgagacccaggagccaaagctgggaccttgagtcacagtgaggcctgcaagaactatacagaggtgacctgaggacaggacacagtgctctgacctcaggtggcagaaaggacaatgggcccgggtttgagttgactgagcttgcacggctaattcatggtgaagccaggcttgggcacgagcccagtctttttctgctgtgcctttccagacttgaggcctcactggccttgactcccacgctctgtcctgtgccttgggagaggagcaggttttgaaggcttggaaatgacgagcggcggggccggcacagcctttgtagcaggaggaatcggttcacgtagccttcctcctgtgcccgctgcgcatgctgactccgcctttcttggcagctgccccggagatgccactagtgcgcatctcctgagagccaaggtggaagctggcacttctgggagaggggaggcatcctgggtggagccacggctttagggagcacccggtagccagctctgccccctccccgactgtaacagtgttgtgccttgtctcgtgtgttggtgatacagcattcctgaaaagcagattccagtgaggctccacaatttccttctaagctgctgatgctcattctgcaagttttttgttgttgttgtttttttgagacagattttcgctcttgttgcccaggctggagtgcaatggcgtgatcttggctcactgcaagctctgcctccgaggttcaagcgattctcctgcctcagcctcccaagtagctgggattacaggcatgtgccgccatgcccggctaattttgtatttcccattctgtaaattttgatgctgtgctttatcgatctttccaggagtcgggcaatgacaccatcacagctgcgcctactgacagtgattgtgagatacaggagatgtggcccacgtgaagctgggggtgccttggcacctgtgcagtatggcacatacttgggagaggcagcgctctgcatggggatctgtgagacccagtttgtcggttatgtcacgttacctctcgaataaggctttgtgacatccagtcagccggaatggagcctgttactgggctgcttagtctcagtaggggttgaagtccggggccacactttctgcccagcttacaggctctgtagctatagtgaatgcctttgaaaagcagtagcatgatggacttacaccctttcaatagcttcatataagattcccaacaagaatgaggtacttcacaatctgcttgattcccaaatggcaggtgcctacagaaggaagtggacttctctgtctggtcctgacagctgacttaggacggcattttggcaaaaactcaacatctgggaaagctcttggtgcagatgttgtccccgaaaggtggaaagggagaggtcctttcttgcattcctcccagagactgggaagcctgtgtgggtggggcctcgcaaggggagacctgcctggaactcaagggagaggagtcctcaccacttcctaacgattccaacctggagcctgttctggcttttttctttttttgggagtgaaggaagagcaggaaggtgtggtttgacaacagtgagctctcttctccagtcttgatgtggacatgtctgtccctcagcagcaccggcctctggggagaagggccctgggtcggtcatacccagagccatagaaagggctggctagaacagcttggccttacggctcacagttcatcttagctgaggtttcctgggacaggaaaaattggtgacacaaagatgtgacaaatctatagcctgatgccatcaggaattggaagtgtcccctcaagccagcaggctagaaataggtgttagctgggcatggtggctcacacctgtaatcccagcactttgggagggaggccaaggcgggacgaatcacgtgaggccgggagttcaaaaccaacctgtccaacatggtgaaaccccgtttctacaaaaaaagaaaatacaaaaattagccaggcctggtggcgggcgcctgtaatcccagctactcggggggctgaagcagagaatggcttgaacccggaggtggagggtgaagtgagctgagagcatgccactgcgctccagcctgggagacagagcgcgactctgtctcgggaaaaaaaacaagttgttatccttccaaagcagtttaaaaatagtccactggaatggctgcattaaagaaaataaataaaaacaacaacaaaaactggcatctatgatgtggcaagggcagagcgcttatggccctaaacgaagccccggcactgcctcatgtcgtctagacccaggctcaacgaaagagcaagcctttcccaagtcttgcctgagttcctcctcaccgggaaccacactgctgctgggtagaagctgaccagcttgatcttctgatacactcaaagcccagctgccataaactgtcttccttgtgctctgaatgcccaacgaaggttgtataaactacctttccttaggtctggagtgtcgggtcagtcaagaagggacccttttagttattaaatagtatctttgcagaatcagggcctggaattggttcacacagattgtttctcctggcacgctgagtagttgggaaactgtgacgtgaacaccagttagatcagccagtagggaagaattctttttttttttgagacggagtcgcccttctctgtcacccaggctggagtgcagtggtgtgatctcggctcactgcagcctccacctcccaggttcaagtgattttcatgcctcagccccccaagtagctgggactacaggtgtgcaccaccacacctggctaatttttgtatttttagtagagacggtgtttcaccatgttggccaggctggattcgaacttctgacctcaaatgatccacctgctttggcctcccaaagtgccgggattacaggcgtgagcaccatgcccagcccagagttcttactttttgagaaaaacaagcctctgaattctgtacactcttggataagatactggatgtgggggtgggagccctgctgaagcaccatacctgtgactcacctttcctctcctatggtagtggcacaggaggaagagggcacttcggcccatttcacacgtttctactgctgccaagaagcctagtcatagaccccttacccccagaaccagtctaaccggagaatattatggaacaagaaatcggcattctctgtttgattctgtgctgccctagtatttctctcatcctagttggcccgcactagagaggctgcccttggcctcatcactgaatcctccaaaagcatcttcaatgcgtgtctgcctgaaaatgcagcctgaaatgtcctggacccctgaaaatgtcctaacccagcagtgagcttcattggctggtgaccagagccctcctaaatcactcccttgacaggtgggccagctcctgcctttgggtggtctttcccttcctagtgcgtgtgcatcctgtgaggcactggcaggaacaagagttggagccaggactggcctgagaattattctgtcgtctgacctgggagacagcgccctcagcaaaaagggcctggcgccatcatttgaagttggtgtgtagcacccaccctccagtcagatcacagatgggaaatcgagaacagaaggtgagaaaacagattccacgttcacatgattattcttgtttattgaggtctctttattctccacgggtgcttttttcttcaagtaaacagagcaggcgcaaatatctataatgaataaatttattgtcttacaaaaatcattgtctagaaatatgggaatacaagaaaagatatttgcggtcaggtgtctggtggtcaacagccagtacagttcataaagggggaaaatccaagattccaaacccacaggacaaattcttcctaatagatgttaaagcttttaacccaaaaggtttgtgttttcaagcacattgcagaggatcaaggatttagaattaacactgattcattgtcactgaatgtctgtaataccactttgactagagaggtacatgatatgaagcacagtcaaaactgaatacattaaattgttatagaggcgaatgatatattcaacattgtcttagtactgtagtgtctaaggcactttccgtaatgtcagtttgcttaactaccaaccaaaaacaggatgctaagtgttcactgtaacactgtccaaagggaagggagaaggaaaaatgaaggagtcacacccactggcatgtcaacattcaggaagatggcatctgttctggaggctccataaacctcattgacaaacttggaacaagcctcggacacaaaaccaatattcccattttgggctcaaagcagcggctgaatttgcaaggtcagcatgagggcccggctggcgatggggaggggccttccaccagctcggcttaggggtccacggctgcttgctcctgacgtgaggagggcgccggcagagccaggcggttcgggagaccatctggaagtctacatgatccatggctgccacctggggcctcagctgcagtgtggccactatcccttctatgcacagaccagccctcgccaaggccagttcacatgagtagatgcgggacaccatcgactcgaggggcagggccccccttgggggatggacatggtaaccccaaatgggtgttgcttccgatccagcccacccctcctactctttccaaagcccctttcacagtttgctcactgaaatagcattgatcattatttgaaggaaatgagagagacaagtgcagtttagagtccacagtggtctaggagacttgatgtggctgaggagtcgggggccacgtgaacacagaactaggttacctgtctgtatgacagagagcatgcagagcgactgagtgacgaccacggcgctgccccaataacccagcgacccgcaaccaagggcctggagtttgttttaaaaagggtcttaccatgttttataaaatggtctcttgatgactatatggaaaatagatgcaatgatgaaacaatctgtttaatatatgtgtcctgtgtgtgtctatatataaaaaggggagcaattgtacctaagtctgaagcaggatacagtatgcataggctggagagccttaagacacagttgatctttcaggaaggaatcccgtagcttgccaatttccgaaatctgcaggaggccccgggtgcattcctaactgtcccactgtattgcctcctctggcttcctgcaactttactctgactggggtggctgcgtctcgttgacatcactggtcttactttctgtgtcatcgtcggagagctccagggaagctccttcaaggtgcagctggcgccggccagatcggctggaagagaagctgatggggccaccccgcctggagaacacaggaagcagatgtgtgtgggtaaacagacaggagcacatggctgtcaatatgttcaaccactcaatgccacggaaccttccccttgcaccccctcctcggacacacgaccttgtgggggtggcggtacgatggggaaggactgcgtgcttttctgcctctcccacaaccctgcctgcagagtacgcgaagcagggtccttggagaactggggaggacttgattcagcctaggactgtgtgatggaaatggtaaggaagacggattaaggccaagctctacctgctaaccagggaatcagccagatagcaaagtgggccacatagggactctgttgcatattctttgtttcggcgtttttataaccatttaaaaatgtagaaaccatgcttagtttgatggctgtataaaagcagggtatgcaccaaatctgcccattggccagatgtgctgaaacctccgccgacctggtcttctggggcagagacttcagctgtagctctctcacgctctgccctctcactggtacagagcagatccattgtggtgaggaggacggtgctgaggagggctgatggcaccaggtcccaggaggagctcctgccctgctttttaagagaggctgggagctcacttcactaatggatatctggacagggatggatgcctgacccagctccagcctggtgtggtggattagtgtggtcctctagtgactggcaatgaatagggccgcctcctcttttattctccccaaggacgactataaaggtcagaaatcttaaatgaagtggttcgggagaaagaatgggtcactgggtatggatctaagtaaacttcctctgaccagctgcaccccgagcctaagctaacccacaaagcagctgcctgtcagctcggggccgcatgcctgctcacctcagccggttcttcagggtgctgacctcgcggctcaggccctcgttggcctcggtggcatcatccagttcccgctggagtttacgccgagatgcgttggcacgcgtcgcttcttcttctgcttcctccagctggcgtttaagctgcttcatccgagcgttggccttctccatcttggggagggtacatgaaccaaaacaaaccaaactggtgaatccagtgtcggcctctctgtaccccgagcgtggcagtgtggggctctgcctgttacccttgtgagcacgcgtgtacacggatgtacacgcgtgcctgggggctggtcggaggctctgtaaccggcctgccgctctcagcaaagctagcatctacaaagcacactaggccaaaagaaatgaaaaagtactcaagactctgtttttaccagtgagttttctgcagaaaaatgacagcgtttactgtcttcacacacgtgacctaggggactgaaagggaattgctattcttgcaaaacgtggaagaaccagcaatgtgggacaatccccagcccagaagatggtacaatgcatctttacacctcctttcaaggatgggcatctcagatactagacttggattcaagcagaaagccaccctgggatgacatgccacagaactaagagcctcccttttggacccttcattcctgagccacacaggcactggtcagtgcttcgtgggtccagcgcacaccaccctcaactgtgctccgtgttgctaggccccaagggtgggggtgggaagggaaggccaggttgcctgactgaatgaatgaagttggggagggttcgggccaaaggcagtgaaatcctcagatccatccacctttctggccagtgtctgcagtgtgaagtctcaccaggcagagggcagggagcgggagggagggtatagctgcccacgctgcaatcagggcaggcctgacccacagttcaaagtcctgcggaacattccctgtgtacttagaaaagggggcctggatgcagacgctgaagctcactcgggtgcagcgtgcagtacctttgtcttcccttcactttctattcagtatctcctgtgcccaccctacacccagccagtatctcatgactgccagcaatatccagaaactatactaggcattagggagataacagggagcaaaacaggcagaaatccctgtactcacgaagcacacattctagtggaggaagcaggagctttacagttcagtccaggcctcactgaacttgcttcctgacctgctctccccgccctcctgtgtctcgggtactgggagtgcccaccaggaacatggaacagcccacgttagctgaaacatcagaatcgggagggccctgaattccactggtcagttgtgccaccagctcattctccaccagttcctttgctcacgcgcttcccagggaggcacttcctcgcgtacctgctctttatactggtccgcgtgtcgacgctcatcctcaacctgcatgaagatttctttcagcttcttctcagtgcgacggactaatttgttggcggctgctcgttccctgtgaaagtggtcacagtagttttgaaattcttgaaatggtattttgtgtgggaaaaaatattttttaaagccccttttctttgggaagatgacacatggtggaggcattatggacctctctgtccagaattcatgactaatgtgctgaaacctttccttctggtcaaaatcagaattgcctttaatgtattcctcaatagtgacaggtagaataagtgcattattcctgcacgtgtaggtgttaattactgtacacaggtattcatcattgtactcagttatcttactttgtttgtttttgagatgcagtcttgctctgtcgcccaggctggggtgcagtggcgccatctctgctcgctgcaacctccgcctcctgggttcaagcaattctcctgcctcagcctcctgagtagctgggattacaaggcatgcaccaccacgctgggctaatttgtgtatttttagcagagacggggttttactacgttggccaggctggtctcgaactcctcacctcaggtgatctgcccgccctggcctcccaaagtgctgggattacagccgtgagccagcgcacccggcctgtacacagtgatctaaagagcaaatgttacatacaatctacctgtcagttatactgaacatagacttttgaagacaccatccttagtttaatcacctaaacttttagcctgagaaacaacccaatttattaagtgattgtttcacttgataatttactaattacctattgtgatgtagagggctttggcagctcacattgaaaaaaaacccaaaaacaaaccccctacactccctctttggttagaggtgaaacaaatccatgtttccagatgcatctacgtcgtcccatatgaaggagaggtaacttatttggaggactccatggaagacagaaaaagttattttgttgcttaacaaatattatgcaaaagtagatagagacagtcagctgaaagggtgtttatgttaattccaactagaaacaaacccttaattgtttgcttcagcccactggagtccaaagaatggagtgggaagtcctggcacgagaggctggggaggatgcagggttctggccgcgagccctgcatttctgggctccaagctccccagcaagagggtgaatctgaaggtctgccctggctctgggcgctatgacctaatagctttgtaatatgcctgccagcagctgtactgtacaatttctcatcaatttcagaatgctttaatacaacaatatgaaagctgttaagcaatcccttctatggggagaagaaaggctctgatttgtgtcatactgcatttgttctctggcagcaaattagcatttcatgggctgccacacgcttgggaaatcgactttgggtaggagatgcaaactcagggtgcctaggaaatcacggggcgccgtcctaaagcccagccttccctgactgttcacggatgccgtctgtcctcccaggctctgaatgctcacagctcttctctcacagctcacaccaacttctgtgtcccactctggttatatgtgttctctgcccacgtggtggggagcccccccgaaaggggcatgcctgttttgtctctgactgagcctagttggtaagttttggtttacggtagcaaaaacctcttacttggcttcctgctcaagctgctcctccagctgcccaatcttggcctccagggctgagatggtggccttgaacttagacttgacagcaccctcgagttcctgcagcttggccttcagctccttgttctgccgctccagttgctggcgtgcattgtcactcttctgggcggcgctgcgctcggctgctagctcggcgttcagtgtgtccacctagagaggagagaggagtttagtcacttgtgcctgaggggtggcacagccctccctgggtgacgggctcctgcatgggccacctgtagagtggtcttgcggaagcggtcgttgagcagctccatgttgctctgctcctcttccagctcctcctccagctgtgcgatccgagcttccagacgccgcttctcatccagcagcgcggacctggcggggagaggaggaggggacggttcaatcccagctcagcacagcacaggagcctcagggaaggctcctccacccaccctgttgctggaaacctgagcagccatcctgaattttctctttcccctgcactcatccccaaatccatcagtaggtcccactgatgacacttccaaacaccctcccccgctgccaccacccagatgcaggcctgtcatctctcacctggactgctgggtggcctcccgctgccctgcctgcctctctccagctgttctccacagacaacagccagagtcgctttcaaaacgcaagcacgaccccagcctccccaccgctgaaactcttcagtggtttccaatgcactgagaatcaaattctaactactcatgatggcatgctcaaaaaggcgcatgatggacgttcagttcagtaatgacttttaacgaaaaaatgaattcagagaaaggtcctatctgaggaacctgcttgccaaagctagctggaaagtgaaggcctgcagtgcccgttggcgcaccccacggctcccccctgcggtgtgcagggctcagcaggactggcacgggtgcagtgcccgttagtgcacaccacggctcccacctgcggtgtgcagggctcggcaggactggcacggggtaccatggctgaggcagcccaggcccagcgagggaggagcaaaccacccgctgatgccaggtgtgtggacacctccagccttctcagcagtgcgcgtgcctgagggcgaagaacccacccccggccgtgggagactcacttgccagaggcgctgttggtgatctcgtccgccagctcatctctctcctgctcggcgtgtcggcgggctcgctcagatgaggcaagttcctaagcagtggagactgcgttaagctctggctgtgaatagtttcctcacctgtggaatctgacagtgcctggagctacagcgaccttgctcctgtcactgtttacctgcacctcaagctgtcatttagatttgagaaattaaactgtcaagaaaatctgctcggtgcaggccagccaggtggtgtgtggtgtcagcatctgacacagatgtccagaggaaagtcttcattgccataagggctttgctgtcacctccaacgtaagaggtggctatgttcctgcccttcttggaaagctggtgcttcttaatataaactgagcatgaactttatataaaccctgaaccctaagaaacatgagctataccaactgatggccctgaagtatctttcacataaacagtttgagatcaaggacgctggctgcacagaccagtgcggatccaggcagctgtgccgcaacaaggatcaatgctcccatggagaggaggcaggtgggggcctccgcaggggctcaagtgtttgcagagctgggcctctaaggtgggcaaggcctctttcttgaaggggactgtggctccacagggggctctcagaggactggacaatggggacagccctgtgcctgccagcccacgggaggaactgcctgatggctgcttttccacaaacttctttggaaggatgatttgccatggaaaggagtcaagggtgcatttatcttataaatgaggaaactgaggcccacctggatgaagatactggcccaaagtcccaaggttagtcagcagcaaaaagtcagggttcctactccctgtccagggctcttcccaccagctgccccttccaaaagatgccacatttggcaagagcacaccttgaaggtgtcttaggagcagggctgcacgggagctcctctgtctgctccagcacgtgcacctgccttacatgagtgtaggctgaaggtcctctgacaggcctgggttctagcacatcctggcacacagggcagggtgggagtcaggaaggaaagagaggcagctgacggaatgttccaggcctgatcccagggccactgactccagacagctctaccatctggcctctggtgttttgtcttcttgggcctatgaaacactcactgtccactggcttgggggtggggctctaggcagactgagggacccacgggagaaaggaagggaccccggggcctctaagccagatgaacggaggtgtttgagggaaggaaaagtgtcagaaatagggggaagggcagggccagctttccagctcagtctcttctccctaatgcagtgtgagtcaggccttgcctgagagtctgaaagaaacactttcagaaaaaacagtgtggtacagagaatgcctcttggacacttgggtaatggcccaggagcgctctctaggaggcaggctccaacagccacatcgcctttggggaaatgagcatttggggatctcaccaatcaactccatgatggatacatagagcttacacatctacttcattgatgaacatgcatcatttttaagtacccacggaacacttataaaaactaacgtgttctaggtcccagagctctttctcagcattctctgaccacaatgtgataaaactagaaatcaacttaaaaaacaagcaaatgccatacatttggaaatttaaaccgcaagcttaaattattcacaggatgaagaagaaaccataatagaaattagaaaaatttagaattacatgacaatgaaattactccacatcaaaatttgtggaacatgatgaaaaccgatcttagaggggaatttacagtcttttataaacatatcagacaagaagcttgagagctgatgagctaagtgtccaactcaagaagtcagaaaaaaaaggagcaaaaaatggtgagatagaggacagcaggacgaaaacctcttgaagctggctctcaggttctctctcagggtcggctccgtgtttactgatctggttttgagttccttgttcattcctgacacctagagagccgtcctcctttcttgcaagctcaactctgcctttgctaatattttatccaatatttataggtgtttgtattgggagttttttcatattaactgataataacatttaacttaccttttcaggtttgaagaaatgttgattatccatcatttatacggtaatgtgtatatttaagtgtgccttgcactgttacagttcctatatgcaacactttatcagtctctgcttcatgagaacttacaagaaagataaatgaaggaataacaggaattcaatgaaacaaacttctctccttttaagttatcacatgagtagtgcttctgtgtaaaaacaaggcaattttgcatcaccaaggttggagttacacagttcttgtgcttatcaacacttccctttcctgcacaggggaacaggccaagaaggtggcctgaaaagctactcatcagctcctttgccttttgccaggtagaggaatatatgtgagcagtgtcgaagtgataactttctgtttccaaactgaagcaacaagaaggttgaggaccatattaaaaatggatacttaaaaaaataaaaaacaaaaatgtatactgacattacagtgggctacaaatatattaacttttttttgatcttggagaaatttcaagggcaaatatatttgttgaacaaatggataagtaacaaaccaacctcctgcaattgaaggatttctgcttccagactcttcaatttcttttcactctctttggattgagcaaaaatctcatctctggatgcacgagcttcttctaattcacgttggtaatccttcatctgagcctaagattaaataagaaggttttggggtggtttacattcttagttttagttaaaataaaatttttttagagatgagccctggctgtgttgcccaggctgatctcaaactcaaggcctcaagcattgctcctgattacaagtgtgagctgcggtgcctggccccattcttagcttgtaaacatggtattttttttctagattataaaagtaatatacattcattgtaaatataaaagtatatgggaatgacaaggatatcgtaagaaaactacagatcaaaatgaaatcccttatgaatacaaatgcaaaaatcttcaacagaatagtagcaaactgaatctggcaacatgtaaaaaggattatacaccatgaccaagcaggatctatctgaggaatgcaaggttggtttgacaaccaaaaatgaattaatgtaaccatatgatcatcacaataaatgctgaagaagcacttgacaaaatctaataccctttcaatataaaaatgctcaacaagctatgaacagaaggaaatttcttcaactctgattaagggcatcaatgaaaaactgacagccaatatcatacttaaggatcaatgaccaaatgctttccctctaaaagatgagcaacaagacaaggatgtctgatcttgccacttctacttaacaatgcaatagagattctagccagggtaattaattaggcaagataaagaaataaaagatatccagattggaaaggaagaagtaaaactagttcaatttgcagatgatctgatattgtatatagaaaatcttaaggaagacactgaaagaattagaactgctggtaatatggacagtaaaagaaaagaaagcccacaagaactaattgatgagtttagcaagattgcgggatacaagatcaacatacaaacatcaattatatttctatacaccaactatgaacattcaaaataaagcaattacatttataataccatcaaaagaatataaacttaggtataaagaaaaaaagtgaaagacttgtataccaagaactacaaaacgtcactgaaaaaaataaaaaagatctaaataaatggaaagattatccatgtttgtagaccagaagacttaatattgttaaaatagcaatactctccaaattgatttacacatcaacacaataaactatcaaaacccaagctggctttttttttttttttttttggtggcagaaattaagctaaggcaggtgtggaaatcatttactcaaagaatttatatccagaatacagaattgtttcaactcaataattaaaagagagctcagctgtttaacctcattagtcattagagaaataaaaataaaagccacaatgaaatgtcacttcacacccactaagatggttacaatcaaaagatggacaataacaaatgttgacaagatgtggagaaattggaaccctcatacatagctggtaggaacgtaaaactgcagtgactgtgggaaacagtttggcagttcctcaaagttaaacacagaggtaccatataacccagctcaattccactcctaggtatatttctgagaaaactgaaagcacatgtccacacaaatgcatatgaatgttcatagaggcattattcagaagtcaaaaaaatggaagcaacccaaatgtccaactgggggatagacgagtaaaatgtggtagatgtatccacacagtagagtgttactcagtaataaaaaggagtgcggtacttgttcatgtggctacatggatgaactttgaaaacatcatgctaagtggaaaaccagtcacaaaaggccacatattgtatgattccactgatatgaaatatggaacaaaggcaaatttatagagactgaaagattagtagttgattaacgcaggatgcagcagggatacagggaatggggagtgacagctaatgggtggaggattcttttgggagggaccaaaatgccccaaatatgatagtggtgatggctgaataagcctatgaataactaaaaaacactgaaaacactaaactggcgaattgtgtggtatgtgaactatatttcaataaagctgttaaataaaatcacagtattatagtttatattctttgtaattaattagcttaataacttttataattagctaataaaaatcttgagcccaggctgcagtgagccatgactgcaccaccatacttcaccctgggtagcagactgagactctatctctgggaaaaaaaacaaaaaaaaaatctttatatttagcttcaaaaaaaaaaaaaaaaaaaaaaaaaaaaaaaaaaaaatggaaacaagttcctaccaacctattacccagagatgactttccctccaaacttttttctaggtatagtatgtctgcctacatgtctgtatgtgaaaatgtatacacacacatgtgtagagttacaagtcaaaccgtcctacaccatattttcctttattcatttaagtctggccatcattccccacacaccccatcacttagatggttagcagtccattgacatttagggggtttccatttttgctatcataaataacaaaacttctgctaaagatctttgtacataaaaatttcttctttatattttgttaaattttcaagatgtatcaacaaggtcaaaggaaaagttttcatcattaacggaccagttcccctgagaagttgctcccatccatcctataggtgagggccccctgcctgcctgctcacaccatgaactcttgcagagatcacttcttgtcattgtggtaatgaaaactggcacatcatctgggtagaaaaagtgacgattaaaacagaccaaaaagatcacaaaagctacagcactaaggggctgggtcaacatgaccctcctctcgaggtgaggaagggtgggttttaagcatcgccacaggctctcagggccacaggaggccagcatgatgcctccaccccaactgtgttgctaagtgcattcaagtatctcctgtggacacagcggacacacaagcactctctttatggcctgctgccccacccccggccacgctgacagcggtgctgtgccccccagcttcactgctggactctgtgtaaaagccacataggtcacgtggtgccatccagagactccatgggtgaaggcacatacctggagcttgcggagctgcttaatcacctcatcccgagctttgttcgcagcctcgatttgggcttcgaggtccttcaggtctatctccatctttttctttgaagctacagcaagcgcccgctgtttcctctcatcctccagctccgcctcgagctcccgcacctaatggacaacatcgggttatgctgggttacatccaagtatctgctcgcagaacaggcagactgttctcaagtggggggctctggttactcgggtgagtggaaacttctgttactctgtagaggtctctgttaccaaacagttactatcaacagaaaaccacagtagctgaattttgttcaaaggggtctttaaacaccaccacctagtacaaaccatcccactgactgctacgagggcatgcgagaaggcagccagtgacctgagctcggtgtagatgaagccaagatggaaaaacccaagacaatacggtaaccatgtaataaaggctggggtaggcacagagcgggcatggggtggttgctaagaggtacagaggactaagcaggcattcctgtttcctagagctgtgaggacatggggcatggccatgttgcaggggtgtcagaaccaggcagaaactgcctttgatcagcaggaaaggggggagcagtcaaagctgtccaatggaggagggacaaaatgaaggcctgctctggagcaggcagatgggagagtgaggatgagtaagatgtgggctggaaaccgaggtggacacacctgtcagccactcactcactctgtggcactcttcactcagcctcctagtgtgcagtggggatagggaactgtgctcacactgtgtgagggatgctcagaagaaggtgctctggagtccttaaaccaaatcctaacgcctctgtcaccaatgatgaggaccagacacagagctgttgagctccaaaccttatcagcccatgagtccacagggactgtgtgtcattgccttgacatggtcttcccaacctgtcctgcttcttccacttattcagccataaatgaatgtttcgtcatgtatttattaaggtataggtcataaataccttaataaatacctgcaccctatgtagtgcagtagcagctggaggctcagcgagcaaagaaaggtccctgccttcacaaccttccgcttcctgcaaagaggatgatggctggtgtgggagctggtatggaggcaccaaggcttgacggagtggtggctccactggtcctctccaaaggggagaaacaaggccaccgctgctgctgctctgcaggggttggcatgggagaggaggagcagggcagctgcttccgcatagggcagaggtgctcgtcatctgcttgctgtgttctgcagagacctggggctgtacctcaaggcacaggatagcagaaggctcctaatgtagagccacttacatgaatttcaaagtgtggtttaaaaaaatttctacaaattctttaatactccccaccttaaagagttggagcataatctcctcttgaatgtgggccagacttagtgacttgcttctaataaacagaataaacaagtgatcacatgagacttgggagatgaggtcataaaaggcccggaagcttcctccttgcttgctttcttttggatctctcactctcctgaagctccctccaggacagtcaggaggcccatgtggtgagctgctgaggcctcctgctgacaccatgtgtgtgagtcagtttggcacgctcctccagccctggtcaggccttcgaattatgcagccagggccgaggtccttactgtaccagaaccactgactcaactgcttcccaattcctcacccacagaaactgtgacaaaaatgttgtcacagtttgcaataatttgttaagtttggggtaatttcttatccagcaataaatgatcaataattagtggagtgaaaataacaaaataaagcaaaattcagtaattccaaatctggccgggcatggtggctcatgcctgtaatcccagcactttgggaggccaaggcgggcagatcacctgagtccaggagtttgagaccagcctggccaacacgatcaaatcccgtctctactaaaaatacaaaaattagctgggcatggtggtgtgtgtctgtggtcccagctacttgggaggctgagacaggagaatcacttcaatctgggaggcagaggttgcagtgagccaagatcgtgccactgcactccagcctgggtgacagagcgagactccgtctgaaaaaacacacacacacacacacacacacacacacacacacaccccaaatccaaaacttactgccatgaactggaagggactggcaaaatacccacaattcatttttaaagtaaagttttagactagaaatttaacatatatgcagaaaagtgtctaatatacattcagaaaagtatacaacttatacatggatagcaactttataaaaggacaaatttaaatatctgctctttttccttttgaagagtgatctaattattaggacttggaatctgaaccacagacatctgccgaatcaccgtgtctgggatgcatcaattctttcctatacccatgttctaagacaaggaacttgaacctaaccacggattcctttgggagtccactgagggctttctgactgataagtgtctggcttgtaggcaggaatgatactgagaaatagtaagacctaaactaattacaataaaatttaaataataaaattctcaaatgaccaaataaattcattttactctatgtgttactctgtgtttactcagatgtgttctaacacgaatgaacaggatactgacccagagctgggctttgagagcctgcaccccttgttgtggaggccgcaccctctgccctacctgtttgatcagcagccgcttcttctcttcattctgctcatccctggtttgcaggtctctctcgaactgcgccttcatggcctgcatgttgacctccagacgaagcttggcatcttccgtggcctggagttcgtcttccagctcctccagctgggtcctcatttcctccacctgctgctctagggcccgtttggatttttcaagttcgtgaacctaaaccaccgaagcatcaggaaagagttgaccggggtggaggcacatatgaagaacagcagtcttactgttttacaggcccactcgtggcatgctggccactttggtccccctgggccggccccctgccacatgcatacacatccttccctctcccctgaaagctgctgctattctccatttcagtgtatgcagttcagaactacagtgcggatgtctttattcccacgtgttctctggtcatcctcctctgatgacctttaagctgagagctcttcagtgagccaaagaacaaaggaaacagccatgtcagggaacctgtctgttgactgactccttgcctgctgtctgtgaggaacaagtacaacagtacatctcttcttgctgtagagaagatcattcgtattgaaaagcacatgtggaaactgctgattattagggtggcttgggcctaagaagcagggcacagtacacaggccttgatctttctctggacaaagatgcccccagcaccatttccctcattctctgcgccaagcactgtgctgagagctccacctcctgtgccctttgaccctcacagcagcctttggagggaggccttggtgctgctgtgcaccccctctggggtccaggaccactgcagttctcacggggacaggcgcggggaatcctaggacaggaggaaggtccatttctacagtgtctggtgctcagtaggcacaaaagacctgtttgtgggatcaacatgtgagtgttgatgctacagaaaacgaacatgaaatcaactgtagagttctctctccacatttcactgtgtaaccatggccacttctactttcagtggcctctttttgtccatggggctagtccctgggcgccaagttgtaggagacccagcagaaaggtgggaccaccttcgctgacttatgatgtggccagatggcccatagcacatgaaaatgagatcctgcctttttagaggactttgtgtgcttttcaaagcagatgcagtaacttcatgaaattgggcaagtataatgtccatctggcagataaggaaacttaggcttcaaaagcttaagtggcttcccatggtcagaatggaagcctgtggaggagccagggaaccttgcctttgataccaggcctgggtttgttttgctatcttcaacacgtcatacactaagggagagacgtagggtaaataaatatcatggcagctcttgtggaagatgtatgcaatggaaagaaaaactgtgccacagaagcttccaagctgtggataagcccccaaagctactgaagctctcaaagaaaacagtggggcctccctgggaagaaccaggtcagagggagctgccattccctcctcctcctctccaggtccccactcacctcatgtttgataactacctgtgacggcagaaccatgaaaccttttgttgaaaggccctcctgccaggatgcaggctggagcagggagggcagtgaaaggacaagaagaaacatgttcacctccagccagtgctgggggaagactgcagaaaacctcacagcagtcccagaagacctgaaccccgtacgcatgcacaggccaaaacactcctagatggctttgctgctgggctgtgcattcccaggtccttcaggctcccctgaggagtcgcccgctcctgtgtgaaggcccaggcccctgggatactctcccgtgcggaagtgtggagcccaccaggcgacttacgttttttcccacatcatctttggagctcatgaggtcttccatgtctgctcggagctgcttgttctgcctctcaaactcctccttggcctccagggcttcctcgagggcccgggccagtgacagggctttggtttctttctctctggcctcggcttcggcccggtcccgctcttcggcatagcgagcagagatgctcttctcttctgctaacagctgtgcagaaggggatgggggaatacgaaaaaccgaaacagtgacatcaacttttctcttccaccatgtggctgatttatcgctagagtgctgccactagattatggtgttcttgtatttcctttttttttttttttttgctttccctttttccaattttgatataaacatgtatcacatttaaatgcctttaaataagattattttaaaccaaacgaacaaaagcaagagctctgccaggaggaaacgacacgtggccgacccacctggtcaaacttcttctgcttcttctccaagttggaggcgacctggcgctggtggtccaggtccaccgtgaggtcgtccagctcctgctgcaggcggttcttggtcttctccagtttgtcatacgccagtgccttctcctccaggcgctggctcagggcctccgcgtccttcagaagcttcttcttggcttcttccagactttcaattgttcccaggtcgtcatctactttcttcttggtatcagccaactaggttttgtgtacggacaaacagaaagctcagtattaatgtactcaattggggccaggcatggtggctcacgcctgtaatcccagcactttgggaggccgaggcggcaggatcacttgaggtcaggagtttgagaccagccaggccaacatagtgaaacctcatctctactaaaaatacaaaaatcgcctgtctgtagtctcggctactggggaggctcaggtgggaggatcacttgagcccaggaggtggaggctgcagtgagctgagatcacgccactgcactccagcctgggcgacaaagtgagactctatctcaaggaaaaaaaaaaaagaactcaattggtttttgcctttgaagaaaaaaaaaaccttttgtttttaatattttgagagaagaaaaatcaatactgtgattttaaaacaaatgagtcttagactgtcacttaatttcttagctaatagtccataaaatgatgactggattgaaatcttacatcgttgacacagtcctaggtccttattttaagggcttccagcattataaccagcatgtggctgggtcaagaaaaaccatttaatgggcttaatttagtacgacctaattaactgtcccaaatggagctgagacagcccagcacagcagggccaggatctgctgaaggcacacatcgaggccaccgcggcctcctaaagaggacgcacacctgggactgcagggccagcacttgcttctccaggttcttcctggcctcctcctcctcctcctgctgctcctgaagactgttcttctcctcttccagctgccggatccgactgctcaggtttagtttctggcgtgtctcctcctgaagaagctcctgtgttttttttttaaagggcaacacttccattacatttatcaccaaaacaaatacacctgtattaaagaattcatgtcgtacaaaagagacagcctcaatgcatgagaacgcccagtgacattaacaaacacagatgatttaaaaacacacacgataactttgtaaaagctcttcacaccaacactgcttcagactcatctctgaaaaacgaatggcggcgccatccacccaggggcccaggctggagcctccaggcatccccgaggcctcccctcctgcgtcccccaccacaccccgcctctcctcagtcacgcctggaatcccttcctctccaccccctgccccgtcttagttcaggccctcagcccttcgaactaggatcacctctcccgtcttaggcatccctcagttatcgtcctttgtatttcctgccagattgacttctaaaatgtaagcacaaacatgtttttcctgttactttcagactgcaaagtcttcagaggcattggttgtgtggagcagaatttctgggccatggcttcggcctcctctagtctcactcaccaggccgcaccttgtcatgcatggggtgtgctttggtaaaaatgaacttgtccccaactgcctaattattccacttttggcctgtctgagatttttttttttaatccccagcacctagcctaaagcctggcaaataaacactcataagtgtttgtaaatttaacaaaactaagctgtaaaactccaagaataaagtgctacattattttcaagtaacctgtagctgacttaaaaacatccctaacggatgatgcaatacaggtcttaacagtctgataagcctcaactcacccttttacaaaatggactgtttctcacaggtcagcacgatgaaattccaaccataaggaaacaatcttattggaaatggccagcaagacattgtgtgcagcaggaccatagcttgggtcaaccacagcccaggcagcggccgtgaatggcagctggagctgtctccgaggccacccacgtgcctgccagacacacgaaccccaggggctctacatcaagacactgagcttccagggagaaatcccgagtagcaaggctggctccaaataaaagtatgacataaaactagtaagaggtgacacagaaggcaattctggggccagcatatttcaccagcttatatattacagaaatgttagttattataaagaccccttgctccccagggaatacctgtgtatcctgtagttgagactcaagactagctgcatccttagcaaatttaatacccttcttctctgcttcttccagaagggtggagacattatctagctcattctgtaaggagcagaagattaaattcaactcaatagtaagcaagcagaaagggtctagaaacacagcttttaaacagaacacagagaagaactcggcgggagtgtgaacctgaaactacccattcagttaaggaagactcaccaccaagagtctgttgccttcaaacggagctcaaataagtaggtactagaacctgcctccctggccaccttaatagtctctacccatgaaaaggacagggggcggggggtctcctaactggtttcctaccttcttctatttttatcatgaagatacaaaaattaaagcaaagcctctgaaagagtgactgtatcctctgtggggaggctgaaggccagcaggtgcttgattttggtccttcacacgaatatgcgttaaccatatgttttgggaggaaagtataattcacattcttatagaacttgaagcttctataaaaggggtacaagaaagttttttttttttttgagatagtctcaccctgtcgccctggctggagtgcagtggtgcaatctgggctcactgcaacctttgcctcctgggttcaagcgattctcctgcctcagcctcccgagtggctgggattacaggcgcttgctaccgcgcccgtctaattttttgtatctttagtagagacggggtttcaccatgttggccaggctggtctcgaactcctgacctcctgatctgcctgccccggcctcccaaagtgctgggatgacagatgtgagccaccacacccggctggaagttcttttaggtttcaaaaaactggtattatatgttcatcatgaatatttaagctatttcttatggtcagatttaattaataatatttttttcttcgcaattaatgatatttctaaaatattttccaaacaaatctttgtggtataagatgctttataatttttgacgacagtgggtgctgggaagacgcagagggacgcagaggggcagcagggcgccgtgcgttctcgctagtcctcgtcacaccggccaagggagagtggacggtggcacagccacagcagagcacatgctgtaacgcttccatggtcactctgtttagcaacatccttcacagagctcacacttcatcagtcttgggaacagtgtggtggggaagggctccaaagtcaagagggactcctgccttcagcaccagctctagaagttgccaggtaagtcaccagagcgggcaagagccttagcttctttgagcctcaggttcctcacctaccagaggggttgactgaggtttaaatggggaacaacgtacatgggagcctagcacatgcctggtgcagcacaggggacaaggaactgtcactcccctcccttccccgccgtaggcagagttcataatgctgtttcagagattttctcttttaggaatagctttccagattgtgtgtgagagcacgcacacaatatttcagtacctacacgttaacacagcaggccgggaccaccctccttcgaaaggcctgcttgcgatgttgacctttggctggtgtgtgggaacttgaatttagcaagagttcccactatttcctgaacaataagggtggcttttctctaaactgtccatgtaaacaatatggtctatgttgaacacctacgtttcttctgggagtctgcaatttgggtttatgctaggcaagaggtgcctatgtaaccagcccctaataaaaaccctgggggccgagtctgtaatgggcttcttggaagaaaacatttcacgcatgctgtcaggactcactgctggaggaattaagcacgtgctgtgtgactccgctgggagaggactcctggaagcttgttcctggtttcctcagcacctcagccctcgtgccctttccttttactgattttgctttgtatcttttcactgtaataaatctttgccatgagcaggcctctgtgctgagtcctagagtcctggagaatcatgtactgtagtgtggtcttgggcctcggacacaagacagctctgtaattctttttcaatgtggcaatataggatgtacatcttttcttaccaataaggactcatcgactatattgtttttgctggttgcatagaagtccgtattaaacattaaagttatttccaaccacagtcagcccttcctatccataggttccatctgtggattcaaccaaccatgtattaaaaatattcagaaaagggccgggcgcggtggctcatgcctgtaatcccagcactttgggaggctgaggcaggcagatcacgaggtcaggagatcgagaccatcctggctaacacagtgaaaccccatctctactagaaatgcaaaaaattagccaggcatggtggcgggtgcctgtagtcccagctacccaggaggctgaggcaggagaattgtgtgaacccgggaggcagagcttgcagtgagccgagattgcgccactgcactccagcctggccgacagagcgagactctgtctcaaaaaaaaaaaaaaaaaaaaaaaaaaaaatcagaaaaaaacccctgcatgtgcactgaccatgtacagttcatgacttttttgggttatttcctaaaaacatgacttttttgagtcgttatttcctaaaacatacagtgtaacaactttttacatagcagttacatcgtcttaggtattataagtaatctagagatgatttatagtatatgggaggatgtgcatatatgcaaatactatgcctttttttttttttttttttgagacagagtcttgttctgtagtccaggctggagtgcagtggcgtgatctcggctcactgcaatctccacctccctggattcaagcgattctcctgcctcagcctcctgagtagctgggattacaggtgtgcaccaccacacctggccaatttttttgtattttttagaagagacagggtttcgccatgttggccaggctggtctcaaactcctgacctcaggtgatccgcccacctcagcctcccatagtgctgggattataggtgtgagctaccacgcccggccccatactataccatttttattagggactccagcatcagaagattttggtatctgcaggaggtcctggatgtaatcccccagtggatactgagggctgactgtatatacttttgtacacacttctgcaatgaacattcttgaagttgactctgtgtgtacatccttagttaattccctaggataaatgactagacatggatttttcgggtctaaggatactcacagttttaaggctcgtgatctaagactgccaaactgtcctttagaagaggttgcactaggctgtgcacagtagctcaggcctgtaatcccagcactttgggaggctgaggggggcggatcacgaggtcaggagattgagaccatcctggctaacgtggtgaaaccccgtctctactaaaaaattcaaaaaattagccggacatggtggcgggtgcctgtagtcccagctactcgggagactgaggcaggagaatagtgtgaacccgggagacagagggtgcagtgagcagagattgcgccactgcactccagcctgggcaacagagcgagactctgtctcaaacaaaaacaaaaacaaaaaaaaaggttgcactaatttataccagcagtgtaaaaaataaaactctcgtaaatctttgccaatgtgaagtataatttttttggcccattgttcctattctcttatttactggactaatggagaagctgaagtgcttaaaactgttaagcaactataaacacaattcagagtggaactgatcaagtccaatcatgctgtgttcttcttaaaataaatattatttaacttcatcaaagtaatagacactagggacacctaagactcgatgtatttactggatagcaattttcaggtgtcgcacagcacattggccatgggtctcttattgcacagagggatacaatggtaaattagggacatgctacagtgggacgtgtgtagagcggaggtttctggcttacctgcagcttacttgctttctccgccagctccaccctgagcctgtcgccttcagagaccttggcatggagctcctggacctgcgcgtcgagcttcttcctcttgtgctcagactcagccttgacctgctgcaggaccttcacctcacacgccagctccttgttatctgtctccaggccctgcttgttcttctctagatttgctttgaactaggagacggaagggaaaacataattcactagttattttctaaaactccatacagaggactgctttttgagtctgcagaattgtgcctaacacacagtgagtctgtagtcaacatctgttgaatgaatgaatgaaaatgtttgctgttctctgagtgtgaggatttctacgtaaggaacacacgcgtacacactgctccgaggagcagatgcagatatttaggggctcactgtgctaagtaattagccttgtccatgccaggtgtgtcctgtctgcagagtcatcactcacactgtcctctgtataaaaaagtgttgttagtgtaaagaattgttttacacttactaacatgagcaggcacccttggtgcaggggtggccacaacaggatgtatctccaatgacatcctgcctcagggacaagattgggtgtagtaaggtggtcacatgggaatctgggccagactgtctggcttcaagctgcctttccacgaaccagctgtgtgaccctggcttaattacctaacaccactggacctcagtttccttgtcttttaaatgggaattataggagactgtgccacagggttgtagcaaagattaaggaaggcaactcgtgtagggtacttagcacagtacttgacacaaacataaatgttccgtaaatgctaatattgtcattgtctaaattaaaaggtggcatgtggctaggcaaagaacagaaagatggagaaactggagcaagaaccaagtcacaaaggcaaggatgattatgggaagtcatggaggccagtctgcacaggagggtggcgtgagtcacagggcacatgaaattaagtttcaggagaacggaaagcctgtgtctgagatacagaagcgggaacaatgaatgaaagccaacactgtgtttggtggctgaggtgagatcacaggcagggaaggacaagaagggagagatgaatgtcaggaacccctgaaggggaacatcggcaggacgtgtgacttactggcagcagacaagttagggaagaatgactttcaaaccattcggggttttgagtgaagccactgggagaagggtttagtgagaagagacactggggaggactgtgtggtttgagatggtggctggatccatgcacttgcatctggcttttcttcctaaggagacagtgtgttttctgaaagccgctcctgtcttggcaactgggtacccagcagcccactcagtgacgtacagaggctggagcctaatcaatacatgactgaacagaacgggcagataggatgggagtggctctgacgacagactttctccaggccacagcacacggcagggcctcccttacccgcttggcctgttccagctgctctgagagctcctccagggctgttgcgtgtctttgtctcatgtcctggatttgagcttcatggttcttagtttcctcctcaagagctttcttcagctctgccacttcttgttcacgttttgtactagagaaggacattttttaagagagatcagaattagctgactgattaaaaacacattttctttttgaaaaagtactgtttttgttttaaatattacataaattcccttaataaatacttgatgtgctatttccagtaggctggcaggtctattactgtgatatcagaaatcctcctagagagctgagtagtggttcatgcctataaccccggcaatttgggaggctaaggtggatcgcttgagcctgggaggttgaggctacaatgagctatgattgcgccactgcacgccagcctgggcgagtgagaccctatctttaaaaaaaaaccaaaaaaacaaacaaccagtgcaacttccatgccatgtctggcttatcaagacacagggtgacatccctaggggtcttcaaattgttctgggtagtctggtttcaccggaggtcaggaattggttaacacaagatgccaaactgcctgccatagccccaacagacttgaataaaactggaaaaagggagtctcccagagattttcaaaagtgaaggggtgacaaaggccaaatgaatcaggacgttgcagtgtaacaaagcaagactcttagcgtccatgtgaagaagccgcaattaactaacatcctcccaaaattctaccaggaaatggcttaaggttggggaggagggcattatcttttggaggggcaggaaaattaaaaggcagctcaaagggttcagaaagggtctctgatgtttgatatgagaacacagcaggtctatggccagagaattggaatgttctgacataaactgtggttttatctaacctgcactttacggtatgaagatcacattagcattaaatatctttccatggctttctaatatttttaaaattggctgtaacaaatacagggtaacttgaataaccagagttattcactgtctaaaagagatcttacttctcatggcgagtccctctaaatttgttaatctgagcaccgtgtttaagcacgagcttgatgaagactgaagccagtcaggtaaacagcactcctgctaagacctatattagcactgttgaattagctacaacctcacactaatcctgaagcacactgctagcaaacttgctctatactttataacatgtcacaacttagaacagtgatttacacactgattcccgtgtggacacatcatccctctcttcacctctcttttcctctcttctcatggagtcacgagatctgcaggggctggctgagagatccctgtgccaagagaacagggcctggtggctgccagctccatggtcgcatgtagcccagccagaaggaatcactaaggattctttgtggtccagcctagctcagccccaagttccactggctcagccagaggtcaaagacgtgctggtctggtcctgtcctctgcaaggctcccatcgagattgtttcagctcactacagggaaatctctcctactagcagcacgttgtcttttgggaaaatagttgtgtgtgtgtgtgtgtgtgtgtgttcctcatccctacttaaatccagtggtcaaaggaaaccttcatcttctcttctccaggctgaacaaccccatttctttcagtttttcatcaaaagtccttaagagagtgaaaatgccagtgagtctgcagaagactcactgttactttatactaatcatgggaagaaccagggcccaggtggggtggtttgtgttctctaagggtccttagcaagaatggaggacatgtctgagctgcaggcaaaacggaatcagtgagtgctacagctgagcacaggcatggttttaataaatatgcgcatttagttttttgcaagggttggatggaaaaatgatcagaaccttattttctattgcagtcaaaagcccagctgggagtggagagttcagccaagtctagttcagtggtttctagattttaaaaaagcagatatgtcaaagagaagcccaggacttaaactactaaaagcagttactctgctgaagtggggtaagggctgggcgcggtggctcacgcctgtaatcccagcactttgggaggccaaggcgggcggatcacctgaggtcgggagtttgcgaccagcctgactaacatggagaaaccccatctctaccaaaaaatacaaaattagccgggcgtggtggcacatgcctgtaatcccagctactcgggaggctgaggcaggaaaatcgtttgaacccgggaggcggaggttgcagtgagccgagatcgcaccatcgtgctccggcctgggcaacaagagcgaaactccgtctcaaaaaaatataaaataaaaaataaaataaaataaaaaagtggggtaggaagcctcgaaccatgcctggctcagatggggtttttcctctctctgggtaaaagctgaagacaaaaaccaaccaacctctgtccggctgccatagctgtacatattcatggctaggatcatggcaaacattccaaggctcacccctctgttctccagcacggagagcctccccacacccaccatctgacctcagtctcactgctctatcgagccggcctgccctgtggacaccatgatgtcattctttccacgaccaagtgcccaggtttccagctgctgggtggacccagctgatgacatccttgtcctctggggaaacgcactggttttcaccacaacctgtttccctcctggttgctctgggtcattttctgcctctctggccacacttgcattcataaacaattccctctctccttcttgctttattccaggcctcagcaactccccagggtgatgggctatcctttccatcattcataccctggaagagccagcaggtgtgcctgcagccagccaaggcacgagggttcccttctggctaggactcctggggtggccctgaggcacttggcagtgtgagtctgggagggagcagatggcctctgccaggacagcaagctggcacaccccccatgctgctctccacagtgatgacacctatgagtccgtgggagccgcaggccagcacctccaggcctgcgtaccggctcactgctaaggctctcctgcgactcgtgggctgccacactgcagctttctacccaggagccttctctggccatgttcacctatgctcgtcacttttttcatgcccgccctggctgctggctcatgatgctgcatatgcctctgcccactgcacactctgtcccagtgcgtgcaccagccttcttctcacccttgtgaaggcacccttcccttttcagctggttacctacaccgttcacaccacctagcactgccagcatgtgtgcctggcctcctgggtatctcctcctattcctgtgtttacccttctccctctggtcctatctatctaaatctcttttcactgccccctgctctgtgtagttgtcactctctccccctagatatccatcactgaccacagcttttccgatcacatccatctccctctgtgtccctcagtctgctggtttacccacccacccctgcacaggtatttctacccataggctggtctgtttctaaccattaccatttaatcaccgttccacctgccatcacaaggaaaagcacaccacctcccaaagatagcaagcacaccaggcatttctgcacgggctcggtggagaggtcggcaggcgcccgggccctgcttcctctcccacactcaccgtagttcctgctgggctgccgtggtgtccagcgtgtcctccagctctgttttcagagcttccagttcctcactcaagtcccttttctgcttttcggccttgttccgtgaagccttctcggattcaaagtcttcctgaagttcagcaatttgggcttgtagctctcgcacaactttaagggcattgttcttatggagtgtttcatcatcacctctgttaaaacacccaggcgcaagaggcactcagagatggcacccggatggcctgtttctcaggcgagccccagcccctgagcacctctccacgagaccccagccccacatccctcctcctggggcctgaggctggtgcagatgctcagcacctgctagggcaggaggaggttctcaggtagaggccttgctgaaggccccaaagctaatggtggcagagccagaactagattccagccccagccccctttccaaacgaccatgcttctccattaaaaggtaggacactcttactttagcccttagaatatgaaaacattttctctgaagtcaaaggctgttatagttaaaaatctgcttctaactatgaaggagtgacctcctcatcacaccggaacccagccaaaccagggatgctcaaagaacacagtagaagaaagaggctctcatcctcataccctccaggtgcctctcttccatagggcatctttttgtttatgtctgtggtttaaaatgttggaagatttttctgattgggaatagttgggatgtttgaggtaagggagatttttcttgaaagattttgattgtaacacattataaactccaagtattacaaccatgtagccaaatagttattctttataaagaaatgaaacattagacatatatttattacatctgatttgcattctaaactgaatggtttagaactgattattgaatcatgctctcagtggagaaatataatttttgaaaagtgatttcccttcaagttctaaaacatactacaggctgggtgaggtggctcacgcctgtaatcccagcactttgggaggccaagtcaggtggatcacttggggtcaggagtttgggaccagcctgaccaacatggtggaaccccatctctactaaaaatacaaaaattagccagtgtggtggtgcacacgtgtaatcccagctagtcgggaggctgaggcacgagaattgcttgaacccaggaagtggagtttgcagtgagctgagattgcaccactgcactccagcctgggtgacagagtgagactccattcaaaaaaaaaaaataaataaaacatactacagttaatctgtaatgtacagagaccaaaacatttgttatagtgaaataatttgttctggtgtgaatttccaagggtttcataatataatttgtcattttaaagtataaatattgagatggtttatgagactttcttgctgtcctgacacaaattctgtacgcctgggcttttcactttctcaggtcacaccaaacagcaagcaaaccccatctcactctcccagggtttttgaatgctcccgaacataacaaagtctgctgaaactcagccccatgggctcccgtgcagcgcagctgctgggctgcagacctggccagtgcgccctgcagctcctcctccttcttggccagctgcagcttgagctcatcaatctgcgcctgcagctctgcgatctggtcctgcaggtcggtcgtctccccgtcgagttttcttttggccttttccagttcctgacgagtcttttcttccttctttaagcgttctttaaggtaagacataagaagctcttcaacacaccgagtgactcaccacaggaataaactaaaatacagactgatccaagttgaaaataagccattttattcaaaagcatgtcactgccctgatgacatggtcatgcgctgatgtcaactgctcagtcatttcaaacccaccgagatctggaggggagataaattagtgtggggagggaattttaaggaagaagttgagtgtcctaagaatgtcctttcatgggaggtgagaccacactgtgagagccgaagggagctggaatcctctcatgtcaaacacatcactgtacccaggtttgcaaagtggctcagcaggtgctggggcagcaatcgtagctgcctgtcaccccattcccttttccatgggaacccctgttctgaaccaagaaaactgccatcctcgagtactgggagagaggagacagaagagtgggcagagagggccaggccttttctccaccctcccctctaaaattctgcagtgatctctcagttagccctagtgatctatttcactgaatgatttatttcctcacaacaacctgtatgcctttgtgttctccaccaggaaccaatttgctgagaggatgagaccgagtgtcacaggctgatcaaacaggtgagtaaaaaagcacatgtgcttatgggtacttcctcagcagaagaaccatatactagtacaaatggtttatgaaagtaatttcatactgacatgccctcttttgtttatactaaaacaaacaaacaaataaaaccccaaatattttttaaaagccaaccccatcgtcttcctatcataaacgcacacattaaccaagagtgggcacctgcctgcaggcgcctgcacagagctccctccccctggtgatggtaccagtctctagctgctctttccaacttccatcctcttttcttattgcttttgcagaagctgtaatgtcctaggatttcctgatattacactgtggcttggccctcagtagtgtcttctctgtatctgccagcttttatgtcactggccagtccctttgtgaggtactttgtgggcactttaatacagctttagattaaacacaatggtctgtaggacccaaacaatataaccccaaccatgcccaccaaagaacagtatcttttaccacagtaccaaagttaaaaaaggaaaaccaggcctggcgccatggctcacgcctgtaatcccagcactctgggaggccaaggtgggtggatcacctaaggtcaggagtttgagaccagcctgaccaacatggtgaaaccccatctctactaaaaatacaaaattagccaggtgtggttggtgcatgcctgtaatccccgctacttgggaggctgaggcaagagaattgcttgaacgcgggagatggaggttgcagtgagccaagattgcgccactgcactccagcctgggcaacaagagtgaaactccatcttaaaaaaaaagaaaaagaaaaaggaaaaccattttatcatcatttcaaggcaacacaaaataatcttaagagccctttttattatgttttaaatacagggtctcgctgtgttacccaggctgtagtgcggttgcatgatcatagctcactacagtgagctcctgggcacaagcaattctgctgcctctgtcaccccacgatcacagctcactctggtgagctcctgggcgcaagcaatccttctgcctcagcttccaagtagctgggactatagatgtgcaccactacgccaggctaatttgtaaattttttgtagagatggagtctcactatgctgcccaggctggtcttaaactcctggcctcatgagatcctcctgcctcagcctcccaaagtgctaggattacaggcctgagacaccgtgcccagccaagggacctattttaataagtcaacccaaactgaaggtccttattattagtaatcatcatgtatattttttatttttgcatgttctgattacagtaaaagctaaacactcacatgtcctagtccctgatttctctagccccaaatactaaccttctaaatctgagatcatcacttcttgcttattcctgattttggccaagtttttcgccttttcttcctcttcagccagctgagaggaacactcagcaatgcgatcttccatgagtttcttttcctggacaggaaaaattgactgcttcagaaaagccattcagaatgaccacttgggttctgtattcctcataaaggtcaactttgactcgagagaaaataagttctatcggcactgcctcccccagcagactgtacacaatcacatgctgcagaacgatgttttggacaatgatgaaccggatacacgacagtggtctcctaagatgatcatggagctgaaaacttcatcgagagctgtcataacaccacagtgcaattactctatttttaaaataaatgtactgcagcctcagtgtgccatgttgataaagtctgcagtcatgtacagcaatgtcctaggccttcacattcactcagcgctcactcactgactcacccagagcagcttccagtcctgcaagctccgttcatggtgagtgcccaatagaggtgtgccattttaaatcttttctatcatttttaccgtaccttttctatcatatttttactggacttttgtgtggatatgtttagatacacaagtacttattagcactgtgttccaactgcctacagtattcaggacagtaacatgctgtacaagtgtgtggcctagatgcaatcagcccagcgtctggtctaggtgtatagcaggctctaccatctagtttgtgtccatacactctatgatgtttgtacgaggataaaataacttcacaatgcatttcccagaatgtgtcctcatcgttaaacaacacacgactgtactccaaaagggcagaaaggcttacacgtcttggtgcccaccccgggagcttggcccagctgcctggtattcagagtcccacagtcaatggtggatgaattaatgcttgcacagatggagacaagtcatcattgagtgaccattatgcacaaactgcacatgttacaagtctaaaagattatcaggatatttgataaggtttaaaaaattcaatggtgcctgtatctttagaaatctatacaagtagagacttacagagaaaattcagtaaatgaacctaaaatcttgagaaatttctgtttgagttcactttcaatgagtgtatcaacataatattatataaatattttctgtaactaaaatcagctttttgtgggaacactctcttactttgatgaacttggaattttggtcctcgagaagcagaatctcctcttccatcttcttgatcttggcctctgctgtcaccttttccagctgcagcttttgccgagccccttcctcctcgtctagctgttcttccaggtccttgtgaagaacacacagtcagtctcgccactttctcgagatttgaccacacattcattgtgcacaggaatgcattacaatgagatactaattttttttttttttttgacacggagtctcgctctgttgcccaggctgaagtgcagtggtgccacctcggctcgctgcaacctccacctcctgggttcacgccattctcctgcctcagcctcccgagtagctgggactacaggtgcccgccaccacgcccggctaattttttgattttttttttggtagagatggggtttcaccatgttagccaggatggtcttgatctcctgacctcatgatccatccgcctcagcctagatactaatttttgattctcaaaatgccaaggatatttaaaaaaatatgaaatgcagttatgtgaaatagacatttgtatccgctacaggctaaagtacaaactgggtcaatccttctagaagccaacatggcaaaacatagctttaaaaatgagcctttcctttcaaccagcaatttcaggaaattgtcacagatgcaatttatataaaaagacatacagtgataagttatttataatattgagtaactatgaacatgctacaaaaaggtcttggtaattaaatgttggcacatttgttaaatggaataatatatagtaattaaaattcacattttggaataatagcaacacagacaaacatgaataatgtagtagcactcatcaaatgtgtatttaatttagctgaatccaactatatacatgttcggccaaagaagagagaaagagaacatgaaaacaataatttaaatagtacaggtcgtgagaaatgagctgtctcagttcaagtgtacctttcacagcagaagcacctcatcaaactgggcgggagcatagagtttacatgtatttttattagaacgtgcagatctttataatctacattactgtttatgataaacatgctattacacaggatcacagatagattaccccattttatatgaggtgattattacacactacatgcctgtatcaaaacatctcatgtaccccatatatatatatatatatatatatatatatatatatatatatatacacacatacatacatacacacacacacacttaatatatacgcataaaaattaaaattaaaaacaaagtgttacagctcttttagaatttgtctagcaggatttctggtttctggtggaaagctcccatcccctccaaaaaacgaaattaaaaaaaaagttaaacaaaacaaaacccaggctgggcgcagtggctcacgcctgtagtcctagcactttgggaggccgaggtgggtggatcacctgaggtcaagagttcgagaccagcctggccaacgtggtgaaacctcgtctctactaaaaatacaaaaattagctgggcgtggtagcaggcgcctgtaatcccagctactggggaggctgaggcaagggaatcacttgaaccgaggaggtggaggttgcagtgagccgagattgcgccattgcactccagcctgggcaacaaagcgagactccgtctcaaaaacagaacaaaaaaacaaaaacaaaaacaaaccccaaaaaaccaaaactagggttgtacaaatcaacacatggccaacttaaggaaatgttcaagagtaacttcggctaaataatttactcatcgttaattttagaatgaaaccatggcaaaaaatgagtgttttcttgtaaaaatttcaaacacacatacaagcacacagaccagcataataagccccacacagaagcatcaccttgaccttaacaagcatcaactcatggtcaattccatttcatgtgtgcctccacctgctcccttctccccctaggttattttgaagcaaatcccagacatcatatttcacttgtaaaaccttcaggctgtacctctaaaatataaagaccatttaaaaagcacatttgtctgtttcaatcacaatccaaaaattgtgcctcatgagtacagcctgtatttcaaaaagaaagttaagtaccagggaagggctaatttttaaaaattctcattctgactgttggccacctcctatgtcagtgctgagcgtttcttattagccaaaccacgtagtagatgtctatctaatgaatggagtgagcaacagaatcactgacaacatgaagaacaagttaggtcttctacagaatgctatagatcctgggaggtttgcgactgtgaatctctttgcaaactgtaagatgccacttagaacataaaaaagattcctatacaaaatgacaaatctttgttcaaagaaaatctattataggtgtgtttcaaatgatggtcatctttctaagagtggcttctcataacccagaacccttttgcttctctgtggacttaagaatccaaacacataacttctgtttattcaacagatccacttgaaaatccaaaatatgcttctaagtaaaaattattatacatacctgaatatgtgcttgcatttttttcttttcattttggaggatttggtttctttcttcttcttcttcaaccctagactccaagtcatgtagaatctcttctaattcctgctttttagcagcaagtcttgccctcatctcttctgcttcagcaaagagctcagtctctgcttgtagttgttctgcaaggatattcttctcttctaaaagctgcaatcacaataaagtgtctgtgatttgcccctattacatacgtacacagtatatattcgccgtgatttcaatggtcaatgcacatcaaagaaactgggagataaaaatatataacatcacgggaagaactttcaaatacgtttttgtctatagcaaaataagcaagatgaaaatattttggttgttcctgttgtctcaagttactgtgaataatacatattaaattcatgatagttcatctatgaaggtaatttacaagggacagataaataggagagtgaaaatattattcaaatgccataaagttcatggtgattactaatgcctgtttggtagtaagtgatatccttggcctttattgttaatatttttggccttgaacactataattctattattgccacaacaaacatctcctgagcctcagctttgtccatgaagaaaacttcccagaagagggacacacattcaagaccactgctgctagagaagttcaggtggtgacctctactcaagcatctcgtcctttgaccatttttctatttcccctcataaacagacataggaaggtgacagtaccgggaacctcatcgaaaacaggtgttaagtacatgcttgacaccaagaataacaaaagcaaagatgcaagaggtaaggttgattttaacttctacaaatctaaaatgcaaggcagaatgtatctgttaactctattggcaaaatatatacaatttggaaatgagtgaaaaggcctcccataaaataagatgatatggtgggtacagctattcataatgaaatgtgtcggggttgctaccagtgcaagatctcatagggattcagggccaagtgtgagttacaaggtcactgcacacacctgctggtgcttccgctccatctcctccagctctccttccaccttcgtctgcttctccttcaccttcaacagctcttcatctttggcctgaagttcttcctcctggcgagtcacttgtagaagcggcttcacctatgacaaaattaagcagtttttttttttttatcattccagctctttcctatgggtttttcctgatcagactctgctatttgaaagggatctggaaagaagtgagccaagctcacctttgtgaagactcgccaccactgccagtgccgtaatttcaggtacgcggcacagttccgctgcaagacctttaaggcacttagttgctgctgcttcttggcaaaggccctgaagaacaataagaaaaacttatgatgtaaagaaaaaagtgcttgaatggctgttgtcataagaagcctttctaaaggcccgtgttcttctttgtctaggatagggaatgattgcatcaatcaagtcctgggtgagacgcacaaggaagccgttctggccgctcgaagccacactggcttgttggcctgctcagcccacctcaggcccctggcaccagttcctgcactgactttcttcagggacgctgccctgcacattctcctgctgccactcagccatatacccacactgcgcacactaagaaaccgattttcctgaggcaatgaagactgtagacagaagggcccgttttctctgtgctgctctctttatcgtgcctttaggagctactctcgttttccttttgatatgtcacagaagaaacatttctccccaacccccaaggtaatttttctcctccttccctccactttgccgcaatggagcgcagcactcaaaagctacaatggggttgtcaatgtctctcatttacggcccggcctcctccagggcctggagatgactctagatctgtggagccctcacctccttgtgaccatacctgggcttcccactacaccctgtcacctcctcagccccacagcagggtctgagacccagttcccattcgccttcactctactatttttcaatttctcactctccttcaggaacacagaaaccctcaacccccctcctgccaaaaacaacccccaggcccaaatgaagctcattaccttgcggttccttcgacagacaactgacatttttctactccttatgaaactctcagggtccacaggcaaacgttcctattactgacttcctggcttccagcagtcggctttctatcccaccacgctaccgaagctgcattttagatcttgacaaaggactcccagactcagaacttagcggcttttcctcagccaaatccaagtgcctggcacgctgcactcctctggggactacccactactggacatctcatccctgcattccagagcaccagaacggcctccgagtctcctgggccccgctaacagtgctgatgctccactccgacagtccactcacacggctgcgctcccacctagactctgagttcctcaggagcagggatcatggcccaggcatttttgttggcacaaccaagtgaccgacagactccaggcctcctgaggatgtttgttgagtaaattaactgggtatttcctagaaataatctgtaattgtttctctggagtccttttataacggcttgcaggagtagctataggactctcctgggaaagagaagcaattgaaggcgatggaaaaaataagaaaaacattttgaattattcattcactccagcaaacagcggtatcaggagtgggagtgtcttaagaaaagacagacagttgctgttttagagcaaaaattacctacctgtcacatttccttgcaagaatcccacaactgctatactgccaacgaattcctccttgctggttagaattttccctgaacccactgcttcataactgattttattcttgctccttacaaaaccttctaacttattcctaccagccaaaaagaattagccaagtctttttttttttttttttttttttttttgagacagagtcttgctctgtcgcccaggctggagtgcagtggtgcaatcttggctcactgaaacctctgcctcttgggctcaagcgattctcatgcctcagcctcccgagaagctgggactacaggtgtgcaccaccatgccttgctaattttttgtatttttagtagagacagggtttcaccatgttggccaggctggtcttgaactcctgacctcaagtgatccccccgcctcggcctccacaagtgctggaattacaggtgtgagccaccgtgcctggccgggattggccaagtcttaattccaagagtttctactacaaaaacaaaagtttcaaaaatgacttttgaatctattaagcatccaccttccaattcttgcaatctccttcaggaatgctgtacaaattcacccaatcttcttattaaaaactactgccctagttgcttctttggccctctgggagataaaactgtcaaatgatgagtcagaaacatgccgggcactttgtttagtggaatgaggcagctggtttccttctccgcagtggtcggctgatttctattacacctgtgtgtcaggcactgtcctccaggttttcatgagggagctgtgacatcaacctatctccgagtgtttggaaagtggacttcaaaagtgttcaaaatcactttagctccttccccctttttatccttatcccaatgtcctccagggtgcttcaagctcaagttcatggatttctgtaaagatacctattattttgactattgtaagcactattctgcctttttccacagtacaatctggttcttttgaataggttatcttctttttttgatgtatcctgattttaagttccagcctaccatatgcatagtgtgaataaaatattgaggggcaggggctgcaaaggcaaaggcatgctggcttacatataagattacatggatttgttagctttaagtccttaagatgaaataatgcaagtgaaatatctttgtttttaactttctatcttgaaaattttgcaagcaaggtttagatcaatgaaaaagctgcacaaagtatatctatatacttcgtttcctgcactttcgatagttgtagcatgtttctggcagatgtcaagttttttgctaactctatgaagttagcctggcacctgccattgctcactccttatgctatgttaggcattctgcagttcagtggatacagtgaggagagtctctgctatcaacaggttctctttattatttatatagtatctaaatattagtatataaaaacccggccgggcacagtggctcacgcctgtaatcccagcactttgggaggctgaggcgggtggatcacaaggtcaggagatcgagaccatcctggctaacacggcgaaaccccatctctactaaaaaaaatacaaaaaattagccgggtgtggtggcgggcgcctgtagtcccagctactcgggaggctgagggaggagaatggcatgaacccaggaggcggagcttgcagtgagccgaggtcgcgccactgcactccagcctcagcgacagagcgagactctgtctcaaaaaaaataaaataaaaacccaattcttttactcctttttgccaaatgtttcttagtatcaacccgaagatatcatctatttgtcttcaactttccatgctactctttttactctgtattctattttataggcaaaaatccacaagtattgcctttaccttcttccgtttaaagccctcttgaccactatctgggcaagcagactgcccaggaaccagagctgttttccaacccacatgtagagtacattattacagagtgctgacttccagtccaggtgttcagattctgtttgctcaaaactgtctggatggcaaactattcaacctgtctcaaattctctcactcccaaacccgaagtgttcagtagaaagaagtaaataccagtattaccttctaaatccaaatcagttctaagtcctttgaattctatctcaaatttaacaacttttctctcgttctccaccaccaccttcttgggtccaggcaccatcatcttctacccaaatcactaagacagcttcccaactggccctcccaattctattcttggccaattctcaatggattctgcctaccgcagccaggcggccttgacagtatagattccccctcactgcactcctaacccctgtccagcgtctgattctcaagcctcttctctcaccttgctccctctcacccatcctgctccagccacactggactgtgtcaccttctcaaatgctgccagactcttgccaggatgctgctgtagttcccttactgaaaagcttctctctcctcccttcacagggccagccttcttacccttgaggtttcagcctcagagaagcattctctgaggacttgagctgaagcaggaccccataccccttggccccgtgtgtgtgtgtgtgtgtgtgtgtgagaagcattctctgaggacttgagctgaggcaggaccccataccccttggccccgtgtgtgtgtgtgtgtgtgtgtgtgtgtgtgtgtgtgtgtgtgtttgagatagggtctcactttgtcacccaggctggcatgcagtggtaccatcttggcttattgcagccttgacctcctgggttcaagagatcctcccgcctcagctcccacaggtagctgggactacaggcgcatgctaccaagcctggctaatttttgtatttttagtagagatggggttttgccatgaagccctggctggtctcgaactcctgagctcaagtgatctgcccacttcagcctcccaaagtgctgggattacaggcctgagccaccacgcccagcctccttgtgtgtttttgtattgcaacatcccattacttagaatgttcatgtatttacctgactatctctgccactataaagcaacttctgtaaggacagactatgtctcacacactcttgcaccccaggtcaaaatgcaatgcttatctagcacaagcacttcctcagtgaacgattaattcgtgaatacccactcactttctggccaggtaacctctgcaaacggcctggaagaagataatgatatcggtgatttttaaatctctttcttcctctaagtgtgccagaactccagctctgaaaaatatcttgctctgtccaattctgtacaagtttgggtccaattctaaagcccggatctaagagagaaagagtttatttactttttttaactacaagaaagattagattaaatctacaagccagaaaaagatcaagaaaaccttaccattcgttcacaggcctgtttaccatccataaaacctttaggaatagcatttggagttaggatctcatatctgtaagagaatattccaagaagtattttgtagaaatttgtgaacgatgtgtatctactaactgtgtgttttgctctaagaggcaataaaatgttgggtaatacatgttaaagatatgatgtaatacatgttcaagaaatgaactggtgataatctgatgttttctgtagatctactttatttctcataagtaaaaatgaggttagttctttcaggtcaaaaagtaggtttaggaggttgtggcagagaaaaatcaaaagcatggtgttttagaaacctttcatttttcttcatgtcccataaaatgttcatatccttaagacgcaaaagagaatctggctttctgtactttaagtcactgtcaatttgtagcatttattagataacaggaagggctgtaagagctgtgttcataggcttctattcaaaacatcagaaaatatcagggtgacatgtgacatgacgttggtctgggtgtatacacatacatatgttcactgagctgcacatttaaaatctgtgtacctcactgtatacagtctatacctcaatcagaaaaataaaagatactggctatatattaaaggaggaatcctggctacatcaatcaactttgtatcttggatgccaattatactccctttttctcctaacaataaaaaatgaaaatctaccagacttcatcatacaatgggatcagaatgatggctttcctcaagacacacatggactggaaaagcttctcaaggtgattctatctggaacagtgggagaaagggcacaaagaccattctttgacctggcagcaccatttatttcatggaacagcaaatggtgtcatactttcaaatctgatttccagaaaaaagaagaaaaaaagcaaactaaaagtaactattcaagaaaattaccaaataaaagttaaaaataactctcaacatatgtttgtatccatttccactgcaagttgatagatcttttcccttttgttttttcttaatccttttctatctactcctttccctatgttagctaaaagactgtaattgcacgcatgtgtgtgcacatgtatacacatacattggaaaaaatacatacacatacacacacacatacagatatattcattgagaaaagatggaaagaagtaccccaacatgtttttaggaatcactccttgatgatttttatttacttttttacttctcttgtattttccaattttcctaaaaggaacatacattactcatctatttaaaaaatcaattttaaaaataattatgttaggcctgtaatcccagcactttgggaggccgaggcgggatcacgaggtcaggagatcgagaccatcctggctagctcagtgaaaccccgtctctactaaaaatacaaaaatttagctgggcatggtggcacgtgcctgtagtcccagcaactcaggaggctgaggcaggagaatcgcttgaacctgggaggcggaggttgcagtgagccgagatggctccactgtactccagcctgggtgacagagcgaagactccatctcaaaaataataaataaataaaaataaaaataattatgtttgaatcccaggtagaactgtctgaatgagtaaactgtaagctttcagctttctatgtttatctcaaagctaacttcagggccctgaaaacatggcatgtttctttgcagcgcccatagcagttcctagcacactccctttttataaagtaggcactcaatcttcctaccaataatcaaggtagtaaggattgtcccttttccagaacctcactatatgtttgctatataagaaaacaaactatgtaggggacaaggaaaaagatttccttattttatcactgttttaattcatatcaagataaactctgatacataagcaaaaaaagtaaaagttagcaatacctctgtctgaattcctggaaaactattcggttagggaagccctggcgacagattcggatcccttccaggacaccgttacagcgaagctgatctaggactaggtgtggatccaattttccagcctaatcaagcaaacaatagtttcatggtttaatctttagcatctgacctagatcagttttaaatactagcatatgttttgctcagcacgtaccctcttctcgtgatttggaatgatacaacgaacaaagttagggttggtgtttcggagagttgccatcagcttggtgagagattctttgtagagttgcccaacggtacgaaacatgcccttcttggttttatatgcggagccaaaagctgtctcagtcataccagtgacttgatccagacccacgatacggtccactggggagaagaaaggagaaaacaaatataagccaaacctcactcgttagcagggaaagaaaagacacagtgaaagtgcagcagcacaagctttgtggaacaaatgacaggagatgccatataggtaaggcagtcagcatacttaggcactgcacaagccgggaactaacagccacacacttatatggcaggatactgtagtgctttgacagctccacaccaacacacaccagcagatgccttccgctgcgctagtttcaggaattcactgtcttggataacattctgactgttacatttacaattatttggaaaatgaaaactcattggctggcattattgatacatacaaactgatactgtgaaaggcctccaaataggaaatggctcataaaaatatatataagaatatctgattgtacaaatccacttaacaaataacctcagggactagggaccagaattctctcttattagtcattagatattcagtgagaaaagtcattcaagttttaggaacaaatgcaggaagattagattacaggagttcagatttttagcaatgtgtaagcttcagttctcttctcaaaacatgaataacacttactaaagggcaagaacacaaaataggaaggactcttctgaaaagataaatgactaagcttcctaggtgttcaatggctaaacttgtcagacattcccttgttacagcaaccgatagttttacattatccacaaagacctagtacttctaatgatgagaccataaacagtacaccagccacaagcaaaacatttggtgcataatgtacatatcctcttattgaaaagaagttaaatgaatgaaacacattactcaaatactttaaaatcaatcagaattatcaactgaactgccctttttaatgccctcctcaaccctaatggacacctcatttctttcatttgtttcctttgacagaagcatatggggacctgacactgtatgaagagctttatgtgcaagatctcattcaattatcaatttccaatgaggtttttaacacaagagaaccaagaccccgggaggtaaaagtgaactgctcaagttatgcaggtcttcagtggaagctgggagaagggcgggtaaaagctgtttaatttccaggcccatgcaggcacactacactacaactgcttccaagcaaagctaccagattcaagggtgtgggtcagagctacctcttttgcttgtgcattggagactgtctacctcagagaccaccattctttcctgtgccttcaacctctccctcttcacttgccccagcagaaagcggcacaaacccacttctgcaggccccataaaatactgatcttcccttgaccctgtatctgcccacttctcttgtcagagccacgcttctttcttgagtagttcacaccgttgctacaccatatcctctcccactaacttcccagtgtgtagccaactggcttatggcccgtcctcttcctctcctgcccaacactactcaggcaatgactggtcaattgctaaatgaatagacaccacccagtgcttgtttttcttgaccctggtacgtttacctggtgatgtcacagcaccattgtaaaaactctccactcctggcttttttaggagctccaccttctcctgtaccctacttccccctcactacttcagtcccatgtttcttgatgatttctcttctgcttttcctgtacctcatggcactcgcctgggatcccaaatcaattcatctgcaacccttctagaataaggcacaatacaaatgctgacactggccctctgcttttctcaagccatattcccaacccaggtgatctcagctatgactctaactagatatacctgaccacccagagccagctgccaaacacctgtgttctactctccactcagatgtcacaaaggtgcctctgccttctacaaatgtttgttcaatcctagcatgtctgctttgactcagtgttgcatccctgctccctgcatgatgtctggcaccaacatacttcatatatacatgtcagtggataaattatgtaaacattaaatatctttgtaattaaaaagagtgagaaatgcattcaaagaaaataacaggatgccataggagaaatgagtggttagagatctctctggggaaatgccatataataccccaaaattaacaatgggcctgtgggaagatgaccactccagtcggtgcaatcagcatatgtgaaagaccaggggcaggaagaagcgaaggaaggccagcacggaggaggaggcaccagtgtgaggaggagcttatgacactcgcactggctgctgcctgcagaatggcctggggaagggggagggagaagtggaagtggggaggccagacaggtgacccttccaggagtccagggtctaggcgatgagggcagctggagctagtgagattacaaagacagatcgagaaggaagattcaacaggtattttagtgggaggactggcttgctcttggatgaacttgatatgcaaagtgaggcagaggagcatttcaagaataactgccagggttctggcttgagcaaccgagtggcggtagggaagacaaggagggaagtgggttttgtggatgggaagacaagacccaaactctaagtaagtctgggatgcctgggggacttcgaagtggaagagaaatgtcaagtgacaagaggaaaattccagtctgctgctaggaagagaggttggaactagaaaggtaaatttgggagttgtcaacttttatctaggggagaccagaaagagatggagggcctaagaccatccccaaggagctcagcagaggaggaggagttaaagagcaatgaaggccaggcatagtggctcatgcctgtaatcccagtattttaggaggccgaggcaggaggatcacttgaggtcaggagtttgagaccagcctggccaacatggtgaaaacctgtctctactaaaagtacaacaaatacaaaaattagctgggcgtggtggtgcacacctgtagttccagctactcggaaggctgaggcaggagaattgcctgaactcaggaagcggaggtcgcagtaagctgagatcatgccactgcactccagcctgggcaacagagcgagactctgtctcaaaaaaaaaaaaaaaaaaaaaaaaaaaaaaaaaaaaaaaaaaaggatatggagaggggacaaaggcccaagtcttaaacccaagcacagatccaccctctgtcctgttcttcctcctgggtttcctatccaatggaaccactgaccaaaagtggtcaagccaaaagttaagatgtcatcgatccaccctcctctcccctgcccttgctgggctcctgcttctgacctggatcctgcacttctcccccatttcatcctctacccgtagtgctacatgtttccttcatttacaccttttgtccctgtgtaatgtagcagccacttctaaaagacaaaactaagtattaacatccttgagtttctcccacagcctgtcggatagtgtccaaataactcagctcagtagtacagcatagcaatggccttcactcagagtcagacacaccacactcatgagctgggtgattctggggcaagtgacccaatttctctaagcctcaatttcctcctcttgaaatggagctaaggagaccacgcttcagagttgtgagcctgaaaaacattcaagtgttcaacgaaggcacctctcttgtccctttcacacatgcccctaaaggccaactgtacaaactagttgcattttcccaaagacacaatgacttcacattccatccttttctctctgcctggaatgcccagcccgctccagtcatcttggcaaatgcttaaatacttttaaatctccattcctttaccagctacctcagggaacccttcttatgctcggttttcaccctgcctccaaagctaaatacaccactcccttctctaggcttcaaatccctgggacagaacttccacactgtttctgtgcttcttctcactggactgagcttccccagggaacatttttccagcatcttacatactcagggccccgaaagctgtgcctatggtgtctctggccccccaaccatcagcggagacaatctcccagccccagatgttggccggtgcctggtgctgggcacacagtagctatttaataaatatctgctaagtgaacttgcacgaagtttaccagaagaacaaatcaccactacaacaaaagaggaagagcaccatgttactctggaaggatcaattacactggttgtgcagtactttagcctacacgggcagttcttaaacacaatctgctgtcagtgttgtgtgtgtggttttttaaaaatatagtaactaataaatagtcataataatcctgattttcaaatttaattttaatacggacaatccaaagctaaatattcagattaaaaaaaataatgctttagactttcagttcttgttttttgtttttttgagatggagtcttgctctgtcacccaggctggagtgcagtggcacaatctcggctcagagcaacctccgcctcctgggttcaagcaattctcctgcctcatccttttgagtagctgggactataggtgcctgccaccatgcctggctaatttttgtatttttagcagagatggggtttcaccatattggccaggctggtctcgaactcctgaccttatgatctgcccgccttggcctctcaaagtgctgggattacaggcgtgagccaccgcgcccagccgtttttaattcaacattttaaactcagggttagattccaccaacaaaatcatcttgtgggtaaaagagaaacactttgggaaattcattaaatgatttgagccacactaataatgtatgatttcactcaataatcaagacccgaaaaaactctattttaagagtattttcttgttgatcaaagcagaaaccagagaaaggcagaaaatgcgaagagaagactccagcagctccttgaaatgggcggcgcgcctcactggaagacctaatattgcttctaaatctcaagtgcccttcctccagccacagtttcagggtaaagattagctttgtttattcttgcactgtaaattcttctatctgagatgtcaggagaccctggttaggattgctggggggcatttaaattcattacttggttctagaagcctgaaaagtattttcttctaacacctaatttactaatctataacaatgtatttaaacagtcagaaattagatgagttccagactgaaatctgtgaggacatattcgcatagctttaagagagaaaatgcaacgtgtcgtctatctcatcatgaaactgccaccaacagtttcatagaaggaatggcatcgcttggtaccgaatccttaactggcccttctaggggataatctaggagacggggccataagatttttatgtttttcaaatctgtgcatgggccaaaatactagtgttactaaatttactttcaagtatttaagctagatcttcagaaattcattctacttaatatagctggaaaccaaaaaagggggaagaaacctatttaatgttaatttcaacagccagatgctgatgactgagagcagcatcacgcgctcctcatgaaaggtatccagtgcccagcactgtgtgaggcatggagcaggttctcaatactcatttaaataaggtaagacaattccaccctcatatagatgaaaatgtcactgttataaacaatttggaaacaaatatatttaactattatgaattcgcagaaacgatcttcacatcagtctgtctccataatatccctgttacgtggtactgtaataacaagtttacagtggttacataactagttgctagaaccgatctgctaattactctagcattgggaaatttttagaaaaaccccaggaagttaagaggttgacaggaagcacatgatttaaggagaaagcaatcttctttatcccaagcactagtctcaagccaaacttgaatgtctcccttatttccatctaccttcctatccctttcggccaggccatctaaggcgctgggcagacaggaagcccctctttgcctacagcttccactgtgctctgcgctcgctttctcccgttgtggggtcccatgtccccaactcatgctgagactgggcagcctggcaccacggcctatcagctgtaccttgggacactatgagcgatactagacttatgttaaggaaagccaaggaaataaacatttatcgggtttctctgttgttctgtaattacagcagcagctgctgcagatgcagccacggcaatggcaactctacaacaccacacattcaggcactccccatgtgccacgcattcaggttcacgttgcctcagttgatactcacagtaaccctgagaactaaatgttgctgtccgcacttgtcctcaggaactcaaactgcagtacccaagcgctgcttctcctcggtgagtttccaactattgctaacactcaagatcaaaaaacagggaggaggagaatataatgcaacaacaaaaaccttcatccattgaaagcgagaacaatttaaacacgtaaactatgtcagacctaaaccacagattctaaaatgggacttgagatggaggttatgatcaatggatgtaatctatatggagattaaatgggtaccatcttatcagtcatgatacttgactctacctggacttctcaggttttccccaatttttgctctgctagtacactcttccggacctgtcagctgcaatctagcacacatggaggttcaaagagcctaactggtgctgttctatgaaggaaattgcaggtgcaggtataaactagcattagtgaaaacgatacataattgtacctccaacatgctttggatcaggtctaaagcctttgatagtctcaattaccctattacccatcacccctttagtccaaaagccctgcctgtagctttcaggttacaacccctttttgctggttcactctgcttgcatcttccactactggtttatctctgaggtccagactttcaaaatatacttggaagaaaacagtccttgactttatagcagaaacttatatgacctccatatttgcctctaggaatcctattctcccctgttcctttctcttctgtacttgtcctgtgatttttctgcaaatctctctttattccagtcccagaagcctgcatgctcttcataatgatatcttcccatcattacacatgtacttaagcacatgggtcctatcagctttgtgtcacctgctttagagaggtgcttaccatatgtcagcacgtcacaggcaatcacaatttggatccctagaaactccttcatccattgtcttccaagaaatcactggaaatattaaagtcctacattttcgttttaaaatcccttagccctctctggggtggtggtcttgaatccataagcgcattaaagagaaaacgattttgctgtaaactattacacacaatctcaaagaacatatttggccttggtagatggatgggcttccaaggagaagcagagattgagatccttggtacttggttcagctaagtaactcaaccaaaggacacctcacagagagagacagaaccgggaacattttcagtgccaaggtgagggtacagtgaggggaatgagccaccccgctgctcattcactagcatgaagtcatctaagagaggctctgggctggatgctgctggtacagcaaaatgcctggtgtatacaccccaaagatcatgctcccacaggaaagagtgtccgtgctttaggtggtcacagtgggaatggaaggcgaagctgctggggctgaaaatgggtgtggggtcgccaccccctatccatccatcagctctctctcagcgacttagtgatgttttgcctcctctgtgccaggtgctgcagaaatgacagtgagcaaagccaggcactgaccctgccctcaaagagctcacagcctgaaattctcttatgaggttagaaatccaaagggaattcatctaaagagggcactcactttaggagaaagtccaaaagatcaagcactaacctttaataaagcacaagtcccaggttatagctgaaaactacctccaagcttcccccgtccatttcaacactgtcagcattccccaacgccaaagaggactgaatttagagatctcttcctttggagttccgtagaattttcattcctgcttatgctgtctctagcataatcttttctctcctcccactccatacttgcagtctacttctttcatagtatgtgaactagaggtgatggcaggaattttgagttggattaaaataggcatggccctttaacattttaaatataacttttgagatggatttggatctcagcattatcatgttccaaaaatcataaaggaaatttcataagataaatttatctttgagtttcgctacttgccagtttcactaaacattcggaaggctgggtgggcttcattttatattgggcttttggagactctgtagctgtagttaggctgtattgtaatacagggctgaggattcagatcacaaagcccaaacatttggagctcaatttaaggttcaatgtataattctgacaacattccactctattttagtctcaacttgcacatatcaggccttgtagatagtttcagggcctctggttgaaaagaaaaggccaagtagccagataggcacacaaattccaaacaaaaggtataatgatgagaccaacacacctgaggtagctatgtaattatttgtctacaaaatgtgtcttaaatacaagaaaaaaatcctccttggaattcctcagagttgaaaatttaaaggtgactcaaaagcaaaggagatgtcatttagcagatcagttcttaacaatttccttagaggactgtgtatcacaatggcactattggaaaaggtagtggcataccttttaatatgcggtgctataagtgctatgcataaaataagaagcaatgtgtaggcagtagcaattaaattgcttatgcactcaaacatttgccttgaagtataataaaactgagcatgaaatgaaaggttcatgcaggcctatgagcaaaacaaaaacagaaacccaaagcccaccccagcccccagtctacccccgccctccccggccaccctgccagtccccccacacgtttttcctgtgggcttaaaacccttctgttttggaagacctacaggctttatacattcacctggtggctcatgaagaccagaaacactgtcatagaaagaagctctctgaatattctgaatctctaaagcagagaaacagcaaaaacaggacagaagagcaaatacacaaacacttcagttagtgtgaaagacatttgacagcacaagtcaactttgaaatcgggctacaaaaggagctagtccaaggcagatcccatgcaaacatgactgtttagagaatttgcacatttggataaagttctttataaaatagattaatgctaaatcaaaagagcacattcccaactcccggtgtgagcattatatgatatcaatgtcaaatgattagcccatgtaaatgcaagatgacatttatgaggaataaggcactatttgagttgtctatcgtaaaaatatcttatcgttagtagcttagggcatgactgcagtgaagtcacagcactatggcgaatgtaagtatcaatggcttttactgtcaaaaattacgctgctgtgtaattaattttacttctaatacagattttcggaaatataatttccgaaaaataatttgaatacaaattaccatatgacagataactaccattaaggaaaacaaaattcaagttctgttgtagcaaaatgttaaaataattttgaattataagcgagattatacttattgatcatactgttactcatgaaaatatcctaggaggtacattgacatgaaaatgcaatctttaggatttttttttttcctcaatataagctttaagaagtgccaagaagtcctttgcagctggtaaagagatcccaaacaacatcttttagcaaaaagtagggcattataaatctctagggcagggctgccaccaataaatcttatttctcctggtttggccttgagaaaactctaaaactctaacacaaactctactttttttctttttctttttttttttttcagttgagacagggtctcgctgtgttgcccaggctggtcttaaactcctggggtcaagcgatccttctgcctcagcctcccaaactgctgggattacaggcgtgagccaccgtgcccagccataaactctattttaacacaaaatgtttcatactgtaggtgttgcaccttcacaggcaaactatattcatatatcatatattcatctattcatgttcaacttgtcgttttctgcttttgcatttaagtggctctaaaaagaggaaaataatgtttttccagggttatttttctagagaaaaattgctccccttatcctgcgatctctctatccagagtgagcagtgataaatcctccaccttagaaccctctttaaccttctgtgcctgccactgctttctgtatgaaacaaactgtcctcaaaattggacaaacatggtactgcttctctgcctgctcctcaccctgaagaacagtgcctcccaacagtgagtggcctctgagatcttctccgtcactcagatgaaactaactgtccacctaagctgaagagcgacagcacctcctgctaagagcagcattatcaggagagcaaacatgtaggagtattccagagcagaggctagcagagccaaagcaaacctggggtagataagatatcccttggcttattttgacaagaatggccaaatgcactcccaacggcatatctctggaaagacaagggccataaatagggctgtgcaaacatggcatctgtgagtcagagctgtggactaagtacagatgaatggggctcacaccagggctgaaggagctcagcaaggcttacagtttcctctaagcatttctgtaatgaaatcaataactttcccgtatctcttaaatggaagacacaaaagtgcaggtaaggagtctccagacagggtcctacctgtaagacatagcatctgtgatctgtaatttgtatgacatcccagcctcccacctccatccttgcccaccaaatcttatatacctacagcttctgacctattgttgccaaagccctctccagtatctggggctggtgagaccttaaattaaagaagaaaggaaggaggaagtaggaagctgggagccaagaaaaagattagctcagttctagtaatgcatctgtgtatatcctggtttctcaactggatcactagctcttgggaggcaggggacatgtctctcattgcttccagatctagctcacagattattgccatgggaagcacatacttaggtatgtagaattatacaaatgggtcaagtgctgaacaggtgtttccaacaccatttttggttaagggatataagacaaggactaaaaaagggttcatagtgtcagaataaatatgtaataaaggacttaatttccatgcttataatgtcagtagtcccaatacctgttttccttcaaaatgaagagaaaaccagtttttgaggcttgttttcaaaaaccaggaaaaaccccatttcctctgttcctgtttcccaggcatcatctccacgcccactgtcatcttcagtcgccccatattcaactcctcacttccaggctctttcactccaatctacccaaaacacactgcctgtttcacttcttcgaattcagaatgggtcactacccaaggtcacaaacctactgatgctatttattcagcacagtctcaagtccaaattccactagagatgggacatgaggactctccagtctagcctcaacctaccatcccagcctcatttcctgctcactcttctctgccccagccctctctaaagccaaatggaacactcctcctgagctatgattttccacctctccactgtgatcattctgtacttcttctcctgccaacttcatttctacaaatgccaccccagacactcactcctagagtcagttcatgcaaaccttcttacccgtttaaggcataaccgggccataaatgctcataaattagtgctgaaaacactgtgtggcacttagtaggtgctcaggagatgttagctttcattgtttaatcaacaaatcattattctcttttaaggacaaggaaaatttgcatcctctcatcatgacatttttcccttagcgccccagaaaaaggtagtcccttcctctgttgcacacccctaaaaattcactgtaccattcccatggcatttatcacagatccactttgcatactgatctcattccttctgctgtgttctaagaccttacaagggtatccagaggagaagctgaacatggggagactttgtaacctacacagtctccaacactgtcacagctgaagtgattcctgaaggaatgcaaatccttacgactgcaacattactcctccctcttcttcctcacatatttcccatccacatttccaactcaccagcgctggcctttctagcactgtagaccccgtaacaacaacctgagctcagaggtctttttctgttctcgtctcagtttctcatatcccactcttaacactgcctgttgacaaggtgaagaggagctcaactctgaggatactgtaagttctattgcagctccctgcttctcttcccagtcctcacacagcatccctcgactgactaggtcactggaagtgacactgcactcagtagtcagttgaagactttcacctaaaggtacaaagattaaaggcttctgttttacttgttggaaagctcgtctttcccccaggtccctcccctctttgctatgtctcaggcccacagtctgctcccaggacgcatgcgtgcctgtgttcagtgcatccccccctgcagctccctcacactgacttgatctgatggacacagtcattcttaagatgatcttttatagggtcacattccccctagtcactttctctgtgtccattcttcaattcctgtctctttcctttggccccaattgccctcagcctgcctgcttccatttgcccttctctgcttccattcctttccctctacctctaagacagctagattacaaggcttaagatgctacagagaaagcagatgtgacccaggttactgaacaggtctggcctcagggtcaaggtctaggcagggttagatccagggctaaggtcctgcatggcctgaagccaggcaaagaggtggaacagagccaggatgaaatgtagcaggtgagctgagctctaggagaagatactggttcctaaaatgcatagagacacagagacattttgattttctgatactagtaaaatcttctagtctacaataaaaatcaccaaaattcttcaactgaggttcatataacaaaagaactatgaggactgatggaaagaagagcaattgatctgtatgcaggcaatttgagtttatccaccagccactgggtgtcgcggcgggtgcgggtggtgaggaaggacggagctcagcaggcctgacacagggaaaatggaatgagcaggccttctcgggttttgtgttccagtgttcctggattacaactgacttgggactgtggtggcctaagtcatacgtgtacgtctttgtggctccgggcctagaatgtttctgtactcctacaacatctgaccaagaaggtagctgtctctgtattcatttcttaacccaagtattgttaaaacggataaattccgatataacggcagccctgctctagggaaagaaagattttaaagtaagaagttatatgtatccatatatatgtaaaagaaccatctataaaccttaattataaaagattccagccaagcatgattacaaagataagcactttcttaccatctttccaaagctctgccacaaatctgtctgatgactggtgcaaaagggtggccacgttgtcattcagggggtccatattcttcatcagccactcatctgccttatagtccacctatcccgcaccaaagccaaaagtggtgaaatggagaacacaaaaccaaatgcaaaaacaaaaacactttaagcctcaaccagaaacttttatacaacagtccccaaaatgggctgtctgaaagacaatatgtttgtaatatatactgtatttgtttataaatgtttatcagcacctttgttacaccttcataaaaatgtagcaaaatttcaaacacagccattttaatccagttattcaacataagagctcttaccttccctgcataatgtataatgcaaaaatcagctttgtcttttaattgtcgaggtttctgaaacttggagtgggaaccttgctcttgaaccagtttttcaacaaaggttttatctgtggctttagggaaccagcattcttcatccaaaagggccagtacaccaggagggttcgcctgataatgacaggcaataagaattcacaagttttgcatgccactttaatactactgagtctggcacttaaacttctaaaacaattagttttatgaagatccatggaaaacaaattgctaggatggaaaggaatgtctaagccataacaagtttataattcaaacactgacatctcaaactgctaaataagtactaacaagaaaacagaggagtaacttatctcaaacttacaaatactgtatgtaaattgcaagtaaatgaattccaagcagatggccccacaaaagtggcaaataaaagaagccagaaacgcagtgggaagtggagagatgaaactgaatgttcatgttcagtgactggctggagaaatcattataacacctcaactaatgagaatgcttcaaacattttatatcctaatcagtttaagtttctgtttaagtaattttaaattaaatgtatcactttatatttggcgaaatattttaaactattattaagtagaatatatggaaattgataaactaagtcagtcatcaattgccttatatatttgttttaacaggcatttgacaacccattttatgtgatgcaattattacttcattgaaaaaaagtagcactttgggaggccgaggcaggtggatcacgaggtcaggggtttgagaccagcctggccaagatggtgaaaccccgcctctactaaaaatacaaaaattagctgggtgtggtggcacatgcctgtagtcccagctactcaggaggctgaggcaggagaatcggttgaacctgggaggcagaggttgcagtgagccgagatggtgccattgcactccagcctgggtaacagagcaagactctgtctcaaaaaaaaaaaaaaagcgctagatgaatccatagagacagagggtagattagtggcagccggggattgaaggaacagaatgtggagtgaccactaatgggtatgaggtttctttctggggtgatgaaaacgtggcaggatttggtagtggtaatggttccacaactttgtgaatatactacaaacatcactgacttgtagttttaaaagggtggatttcatggtttgtgaattatgtctcaatttttaaaaaggcctagagctcaccattgtctggagtgacttcctttttggaggtaaatgacacatgaaagctaaataagatatttaaatagtgatggtctattttctagtgcttctgggccatcatttattgtcacactgcaaatatggcaagtgtgtgatacaaaactgaactcgtaccagttctagggcacactcatgaaatcagctgtttgagtaagactctaagatcagttctcatcaactcacaaagctttcatatttactggcaaagagttggcaatacacacaaatgctgtttttaaaagtagctagaggctatggttaaatataaatgaaacagtgtaataaagtggtcagagaaagggatgggtgatctgaatgccagcgggtggaagctgagggaacccttctgcaatggagacccttaccccagggctcctccacctgaaagaattgtcagggtttcagatcagctaaaaagaagacagtaatctgaagcaactgggattaggtcactttagaggagctcagagtggcaggtaactcaatccaccctaatcacacaacaactgtgagaaaggaagttccacattaatattaatataacaaaaacatcctccttttacccttttacattcttaaccacttttaatgagaattttcctaaattctgacacagtatctcaaataaaaatttgtatttttttctaaatgacttggtgacagcatgatcatgaatatcattactgtgtctccttttcattttttccacttcatccttcaatgtcaagatctctattatcattccttctctgaaccgggtatttccaagagctgtaagcttagaagcctgtgtttctgaatattggtcataggttttgtgaaagcttgtgaactcagaggcttgcctgccaccagcccacagtctggcaaggcaggggctgggattatgcgagatgagctaagcctggcacgggcctgtcaggtgccaccacagaggatgtttttacagcattttccttctagaaagtattgttttcactctccattttgcaaggaacatcaatgggatcattatcccatgtcattccacaggctgtcgttaaattccccatcatcataaactctcatggggtttacaaaatgttatgtttttattttttattattattattttttgagacggagtctcgctcttgtcccccaggctggagtgtggtcacgcgatcttggctcgctgcaacctccacctcccggcttcaagcgatcctcctgcttcagcctcccgagtagctgggattacagacaaccgccacgacgcctggctaatttctttttgtatttttagtagagatggagtttcaccatgttggtcaggctggtctcgaactcctgacctcaagtgatctgcccgccttggcctcccaaagtgttgggattacaggcgtgagccactgtgcctggccatgtttttattttttaatcagatatttctatgaataagtagaataatcctcaaattgaggtaaagagtgagtcagcattaaatcttgaattccttccctcccctttctgagctatctctcctataaattaggactatttaggcagggaataaagggtccactctaaaggctgaaggaagagcctagaagtgccagtacaaagaggataggaaggaaagaaggaacgagttacctagttctactcattgcccgtcagtgtctgggcataactggtgactaggaacatcatgacttcccagctccaatactttctgaatgccctggctgctgtggtttcaatgtgttccctgaaagttcacatgttggaaacctggttcctaatgcagccgtgttgagagataagacctttgggaggtaactgggtcatggggctctttcctagtaaatggattaattcattcatggatcaatgggttgttgaggaggtgggttagttatcatgagagcgggtctgtcataaaaaagccagtttggccatttcttatgagcccccccaacatgtgatgccctgtgccaccttaggactctgccaagagtccccaccagcaagaataccctcatccaatgcagctcctagacctgggacttcccagcctatagactacaagaaatcaatttcttttctttataaattactccatcttacttattctgttata
